(19) United States
(12) Patent Application Publication
(10) Pub. No.: US 2005/0222399 A1
(43) Pub. Date: Oct. 6, 2005

(54) BIOINFORMATICALLY DETECTABLE GROUP OF NOVEL REGULATORY OLIGONUCLEOTIDES ASSOCIATED WITH ALZHEIMER'S DISEASE AND USES THEREOF

(75) Inventor: Itzhak Bentwich, Kfar Daniel (IL)

Correspondence Address: ROSETTA-GENOMICS, 10 PLAUT-STREET SCIENCE PARK, P.O. BOX 2061, REHOVOT, 76706, IL

(73) Assignee: ROSETTA GENOMICS, Rehovot (IL)

(21) Appl. No.: 10/708,204

(22) Filed: Feb. 16, 2004

Related U.S. Application Data
(63) Continuation-in-part of application No. 10/649,653.
(63) Continuation-in-part of application No. 10/651,227.
(63) Continuation-in-part of application No. 10/707,147, filed on Nov. 24, 2003.
(63) Continuation-in-part of application No. 10/604,985, filed on Aug. 29, 2003.
(63) Continuation-in-part of application No. 10/604,926, filed on Aug. 27, 2003.
(63) Continuation-in-part of application No. 10/604,727, filed on Aug. 13, 2003, now abandoned.
(63) Continuation-in-part of application No. 10/604,726, filed on Aug. 13, 2003.
(63) Continuation-in-part of application No. 10/707,975, filed on Jan. 29, 2004.
(63) Continuation-in-part of application No. 10/707,980, filed on Jan. 29, 2004.
(60) Provisional application No. 60/468,251, filed on May 7, 2003.

(30) Foreign Application Priority Data
Nov. 26, 2003 (WO) PCT/IL03/00998

(51) Int. Cl. C07H 21/02; G06F 19/00; G01N 33/48; G01N 33/50

(52) U.S. Cl. 536/23.1; 702/20

(57) ABSTRACT

The present invention relates to a first group of novel oligonucleotides, here identified as genomic address messenger or GAM oligonucleotides, and a second group of novel operon-like polynucleotides, here identified as genomic record or GR polynucleotides. GAM oligonucleotides selectively inhibit translation of known target genes, many of which are known to be involved in various diseases. Nucleic acid molecules are provided respectively encoding 1708 GAM oligonucleotides, and 246 GR polynucleotides as are vectors and probes both comprising the nucleic acid molecules, and methods and systems for detecting GAM oligonucleotides and GR polynucleotide and specific functions and utilities thereof, for detecting expression of GAM oligonucleotides and GR polynucleotides and for selectively enhancing and selectively inhibiting translation of the respective target genes thereof.

### CROSS REFERENCE TO RELATED APPLICATIONS

[0001] This application is a continuation in part of and claims priority from the following patent applications, the disclosures of which applications are all hereby incorporated herein by reference: U.S. patent application Ser. No. 10/707975 filed 29 Jan. 04, U.S. patent application Ser. No. 10/707147 filed 24 Nov. 03, U.S. patent application Ser. No. 10/707147 filed 24 Nov. 03, U.S. patent application Ser. No. 10/604985 filed 29 Aug. 03, U.S. patent application Ser. No. 10/651227 filed 29 Aug. 03, U.S. patent application Ser. No. 10/649653 filed 28 Aug. 03, U.S. patent application Ser. No. 10/604926 filed 27 Aug. 03, U.S. patent application Ser. No. 10/604726 filed 13 Aug. 03, U.S. patent application Ser. No. 10/604727 filed 13 Aug. 03, and U.S. Provisional Patent Application Ser. No. 60/468251 filed 07 May 03. This application also claims priority from International application Number: PCT/IL 03/00970, filed 16 Nov. 03, the disclosure of which application is hereby incorporated herein by reference. All of the aforesaid patent applications are entitled “Bioinformatically Detectable Group of Novel Regulatory Genes and Uses Thereof”; This application also claims priority from U.S. patent application Ser. No. 10/707980 filed 29 Jan. 04, entitled “Bioinformatically Detectable Group of Novel Regulatory Oligonucleotides and Uses Thereof”; U.S. patent application Ser. No. 10/707980, filed 29 Jan. 04, entitled “Bioinformatically Detectable Group of Novel Regulatory Oligonucleotides and Uses Thereof” is a continuation in part of and claims priority from the following patent applications, the disclosures of which applications are all hereby incorporated herein by reference: U.S. patent application Ser. No. 10/707147 filed 24 Nov. 03, U.S. patent application Ser. No. 10/707147 filed 24 Nov. 03, U.S. patent application Ser. No. 10/604985 filed 29 Aug. 03, U.S. patent application Ser. No. 10/651227 filed 29 Aug. 03, U.S. patent application Ser. No. 10/649653 filed 28 Aug. 03, U.S. patent application Ser. No. 10/604926 filed 27 Aug. 03, U.S. patent application Ser. No. 10/604726 filed 13 Aug. 03, U.S. patent application Ser. No. 10/604727 filed 13 Aug. 03, and U.S. Provisional patent application Ser. No. 60/468251 filed 07 May 03. This application also claims priority from International application Number: PCT/IL 03/00970, filed 16 Nov. 03, the disclosure of which application is hereby incorporated herein by reference. All of the aforesaid patent applications are entitled “Bioinformatically Detectable Group of Novel Regulatory Genes and Uses Thereof”; U.S. patent application Ser. No. 10/707975, filed 29 Jan. 04, entitled “Bioinformatically Detectable Group of Novel Regulatory Genes and Uses Thereof” is a continuation in part of and claims priority from the following patent applications, the disclosures of which applications are all hereby incorporated herein by reference: U.S. patent application Ser. No. 10/707147 filed 24 Nov. 03, U.S. patent application Ser. No. 10/707147 filed 24 Nov. 03, U.S. patent application Ser. No. 10/604985 filed 29 Aug. 03, U.S. patent application Ser. No. 10/651227 filed 29 Aug. 03, U.S. patent application Ser. No. 10/649653 filed 28 Aug. 03, U.S. patent application Ser. No. 10/604926 filed 27 Aug. 03, U.S. patent application Ser. No. 10/604726 filed 13 Aug. 03, U.S. patent application Ser. No. 10/604727 filed 13 Aug. 03, and U.S. Provisional patent application Ser. No. 60/468251 filed 07 May 03. This application also claims priority from International application Number: PCT/IL 03/00970, filed 16 Nov. 03, the disclosure of which application is hereby incorporated herein by reference. All of the aforesaid patent applications are entitled “Bioinformatically Detectable Group of Novel Regulatory Genes and Uses Thereof”; U.S. patent application Ser. No. 10/707147, filed 24 Nov. 03, entitled “Bioinformatically Detectable Group of Novel Regulatory Genes and Uses Thereof” is a continuation in part of and claims priority from the following patent applications, the disclosures of which applications are all hereby incorporated herein by reference: U.S. patent application Ser. No. 10/604985 filed 29 Aug. 03, U.S. patent application Ser. No. 10/651227 filed 29 Aug. 03, U.S. patent application Ser. No. 10/649653 filed 28 Aug. 03, U.S. patent application Ser. No. 10/604926 filed 27 Aug. 03, U.S. patent application Ser. No. 10/604726 filed 13 Aug. 03, U.S. patent application Ser. No. 10/604727 filed 13 Aug. 03, and U.S. Provisional patent application Ser. No. 60/468251 filed 07 May 03. This application also claims priority from International application Number: PCT/IL 03/00970, filed 16 Nov. 03, the disclosure of which application is hereby incorporated herein by reference. All of the aforesaid patent applications are entitled “Bioinformatically Detectable Group of Novel Regulatory Genes and Uses Thereof”; International application Number: PCT/IL 03/00970, filed 16 Nov. 03, entitled “Bioinformatically Detectable Group of Novel Regulatory Genes and Uses Thereof” is a continuation in part of and claims priority from the following patent applications, the disclosures of which applications are all hereby incorporated herein by reference: U.S. patent application Ser. No. 10/604985 filed 29 Aug. 03, U.S. patent application Ser. No. 10/651227 filed 29 Aug. 03, U.S. patent application Ser. No. 10/649653 filed 28 Aug. 03, U.S. patent application Ser. No. 10/604926 filed 27 Aug. 03, U.S. patent application Ser. No. 10/604726 filed 13 Aug. 03, U.S. patent application Ser. No. 10/604727 filed 13 Aug. 03, U.S. Provisional patent application Ser. No. 60/468251 filed 07 May 03, and U.S. patent application Ser. No. 10/345201 filed 16 Jan. 03. All of the aforesaid patent applications are entitled “Bioinformatically Detectable Group of Novel Regulatory Genes and Uses Thereof”; U.S. patent application Ser. No. 10/604985, filed 29 Aug. 03, entitled “Bioinformatically is a continuation of U.S. Provisional patent application Ser. No. 60/468251, filed 07 May 03, entitled “Bioinformatically Detectable Group of Novel Regulatory Genes and Uses Thereof” the disclosure of which is hereby incorporated herein and claims priority therefrom; and is a continuation in part of and claims priority from the following patent applications, the disclosures of which applications are all hereby incorporated herein by reference: U.S. patent application Ser. No. 10/651227 filed 29 Aug. 03, U.S. patent application Ser. No. 10/649653 filed 28 Aug. 03, U.S. patent application Ser. No. 10/604926 filed 27 Aug. 03, U.S. patent application Ser. No. 10/604726 filed 13 Aug. 03, U.S. patent application Ser. No. 10/604727 filed 13 Aug. 03, U.S. patent application Ser. No. 10/345201 filed 16 Jan. 03, U.S. patent application Ser. No. 10/321503 filed 18 Dec. 02, U.S. patent application Ser. No. 10/310914 filed 06 Dec. 02, and U.S. patent application Ser. No. 10/293338 filed 14 Nov. 02. All of the aforesaid patent applications are entitled “Bioinformatically Detectable Group of Novel Regulatory Genes and Uses Thereof”; U.S. patent application Ser. No. 10/604926, filed 27 Aug. 03, entitled “Bioinformatically Detectable Group of Novel Regulatory Genes and Uses Thereof” is a continuation of U.S. patent application Ser. No. 10/345201, filed 16 Jan. 03, entitled “Bioinformatically Detectable Group of Novel Regulatory Genes and Uses Thereof” the disclosure of which is hereby incorporated herein and claims priority therefrom; and is a continuation in part of and claims priority from the following patent applications, the disclosures of which applications are all hereby incorporated herein by reference: U.S. patent application Ser. No. 10/604726 filed 13 Aug. 03, U.S. patent application Ser. No. 10/604727 filed 13 Aug. 03, U.S. Provisional patent application Ser. No. 60/468251 filed 07 May 03, U.S. patent application Ser. No. 10/321503 filed 18 Dec. 02, U.S. patent application Ser. No. 10/310914 filed 06 Dec. 02, and U.S. patent application Ser. No. 10/293338 filed 14 Nov. 02. All of the aforesaid patent applications are entitled “Bioinformatically Detectable Group of Novel Regulatory Genes and Uses Thereof”; U.S. patent application Ser. No. 10/649653, filed 28 Aug. 03, entitled “Bioinformatically Detectable Group of Novel Regulatory Genes and Uses Thereof” is a continuation of U.S. patent application Ser. No. 10/321503, filed 18 Dec. 02, entitled “Bioinformatically Detectable Group of Novel Regulatory Genes and Uses Thereof”; the disclosure of which is hereby incorporated herein and claims priority therefrom; and is a continuation in part of and claims priority from the following patent applications, the disclosures of which applications are all hereby incorporated herein by reference: U.S. patent application Ser. No. 10/604926 filed 27 Aug. 03, U.S. patent application Ser. No. 10/604726 filed 13 Aug. 03, U.S. patent application Ser. No. 10/604727 filed 13 Aug. 03, U.S. Provisional patent application Ser. No. 60/468251 filed 07 May 03, U.S. patent application Ser. No. 10/321503 filed 18 Dec. 02, U.S. patent application Ser. No. 10/310914 filed 06 Dec. 02, and U.S. patent application Ser. No. 10/293338 filed 14 Nov. 02. All of the aforesaid patent applications are entitled “Bioinformatically Detectable Group of Novel Regulatory Genes and Uses Thereof”; U.S. patent application Ser. No.10/651227, filed 29 Aug. 03, entitled “Bioinformatically Detectable Group of Novel Regulatory Genes and Uses Thereof” is a continuation of U.S. patent application Ser. No. 10/310914, filed 06 Dec. 02, entitled “Bioinformatically Detectable Group of Novel Regulatory Genes and Uses Thereof”; the disclosure of which is hereby incorporated herein and claims priority therefrom; and is a continuation in part of and claims priority from the following patent applications, the disclosures of which applications are all hereby incorporated herein by reference: U.S. patent application Ser. No. 10/604985 filed 29 Aug. 03, U.S. patent application Ser. No. 10/649653 filed 28 Aug. 03, U.S. patent application Ser. No. 10/604926 filed 27 Aug. 03, U.S. patent application Ser. No. 10/604726 filed 13 Aug. 03, U.S. patent application Ser. No. 10/604727 filed 13 Aug. 03, U.S. Provisional Patent Application Ser. No. 60/468251 filed 07 May 03, U.S. patent application Ser. No. 10/345201 filed 16 Jan. 03, U.S. patent application Ser. No. 10/321503 filed 18 Dec. 02, U.S. patent application Ser. No. 10/310914 filed 06 Dec. 02, and U.S. patent application Ser. No. 10/293338 filed 14 Nov. 02. All of the aforesaid patent applications are entitled “Bioinformatically Detectable Group of Novel Regulatory Genes and Uses Thereof”; U.S. patent applications Ser. Nos. 10/604727 and 10/604726, filed 13 Aug. 03, entitled “Bioinformatically Detectable Group of Novel Regulatory Genes and Uses Thereof” are a continuation of U.S. patent application Ser. No.10/293338, filed 14 Nov. 02, entitled “Bioinformatically Detectable Group of Novel Regulatory Genes and Uses Thereof”, the disclosure of which is hereby incorporated herein and claims priority therefrom; and are a continuation in part of and claims priority from the following patent applications, the disclosures of which applications are all hereby incorporated herein by reference: U.S. Provisional Patent Application Ser. No. 60/468251 filed 07 May 03, U.S. patent application Ser. No. 10/345201 filed 16 Jan. 03, U.S. patent application Ser. No. 10/321503 filed 18 Dec. 02, U.S. patent application Ser. No. 10/310914 filed 06 Dec. 02, and U.S. patent application Ser. No. 10/293338 filed 14 Nov. 02. All of the aforesaid patent applications are entitled “Bioinformatically Detectable Group of Novel Regulatory Genes and Uses Thereof”; U.S. Provisional Patent Application Ser. No. 60/468251, filed 07 May 03, entitled “Bioinformatically Detectable Group of Novel Regulatory Genes and Uses Thereof” is a continuation in part of and claims priority from the following patent applications, the disclosures of which applications are all hereby incorporated herein by reference: U.S. patent application Ser. No. 10/345201 filed 16 Jan. 03, U.S. patent application Ser. No. 10/321503 filed 18 Dec. 02, U.S. patent application Ser. No. 10/310914 filed 06 Dec. 02, and U.S. patent application Ser. No. 10/293338 filed 14 Nov. 02. All of the aforesaid patent applications are entitled “Bioinformatically Detectable Group of Novel Regulatory Genes and Uses Thereof”; U.S. patent application Ser. No. 10/345201, filed 16 Jan. 03, entitled “Bioinformatically Detectable Group of Novel Regulatory Genes and Uses Thereof” is a continuation in part of and claims priority from the following patent applications, the disclosures of which applications are all hereby incorporated herein by reference: U.S. patent application Ser. No. 10/321503 filed 18 Dec. 02, U.S. patent application Ser. No. 10/310914 filed 06 Dec. 02, and U.S. patent application Ser. No. 10/293338 filed 14 Nov. 02. All of the aforesaid patent applications are entitled “Bioinformatically Detectable Group of Novel Regulatory Genes and Uses Thereof”; U.S. patent application Ser. No. 10/321503, filed 18 Dec. 02, entitled “Bioinformatically Detectable Group of Novel Regulatory Genes and Uses Thereof” is a continuation in part of and claims priority from the following patent applications, the disclosures of which applications are all hereby incorporated herein by reference: U.S. patent application Ser. No. 10/310914 filed 06 Dec. 02, and U.S. patent application Ser. No. 10/293338 filed 14 Nov. 02. All of the aforesaid patent applications are entitled “Bioinformatically Detectable Group of Novel Regulatory Genes and Uses Thereof”; U.S. patent application Ser. No. 10/310914, filed 06 Dec. 02, entitled “Bioinformatically Detectable Group of Novel Regulatory Genes and Uses Thereof” is a continuation in part of U.S. patent application Ser. No 10/293338, filed 14 Nov. 02, entitled “Bioinformatically Detectable Group of Novel Regulatory Genes and Uses Thereof”, the disclosure of which is hereby incorporated by reference and claims priority therefrom.

### REFERENCES CITED

[0002] Altschul, S. F., Gish, W., Miller, W., Myers, E. W., and Lipman, D. J. (1990). Basic local alignment search tool. J. Mol. Biol. 215, 403-410.

[0003] Ambros, V., Lee, R. C., Lavanway, A., Williams, P. T., and Jewell, D. (2003). MicroRNAs and Other Tiny Endogenous RNAs in C. elegans 1. Curr. Biol. 13, 807-818.

[0004] Calin, G. A., Dumitru, C. D., Shimizu, M., Bichi, R., Zupo, S., Noch, E., Aldler, H., Rattan, S., Keating, M., Rai, K., Rassenti, L., Kipps, T., Negrini, M., Bullrich, F., and Croce, C. M. (2002). Frequent deletions and downregulation of micro-RNA genes miR15 and miR16 at 13q14 in chronic lymphocytic leukemia. Proc. Natl. Acad. Sci. U. S. A.

[0005] Dan Gusfield, Algorithms on strings, trees, and sequences: computer science and computational biology, Cambridge University Press, 1997.

[0006] Elbashir, S. M., Lendeckel, W., and Tuschl, T. (2001). RNA interference is mediated by 21- and 22-nucleotide RNAs. Genes Dev. 15, 188-200.

[0007] Gibbs, W. W. (2003). The unseen genome: gems among the junk. Sci. Am. 289, 46-53.

[0008] Gussow, D. and Clackson, T. (1989). Direct clone characterization from plaques and colonies by the polymerase chain reaction. Nucleic Acids Res. 17, 4000.

[0009] Hamosh A, Scott A F, Amberger J, Bocchini C, Valle D and McKusick V A.(2002).Online Mendelian Inheritance in Man (OMIM), a knowledgebase of human genes and genetic disorders. Nucleic Acids Res. 30: 52-55.

[0010] Jenuth J. P. (2000). The NCBI. Publicly available tools and resources on the Web. Methods Mol. Biol. 132, 301-312.

[0011] Kirkness, E. F. and Kerlavage, A. R. (1997). The TIGR human cDNA database. Methods Mol. Biol. 69, 261-268.

[0012] Lagos-Quintana, M., Rauhut, R., Lendeckel, W., and Tuschl, T. (2001). Identification of novel genes coding for small expressed RNAs. Science 294, 853-858.

[0013] Lau, N. C., Lim, L. P., Weinstein, E. G., and Bartel, D. P. (2001). An abundant class of tiny RNAs with probable regulatory roles in Caenorhabditis elegans. Science 294, 858-862.

[0014] Lau, N. C. and Bartel, D. P. (2003). Censors of the genome. Sci. Am. 289, 34-41.

[0015] Lim, L. P., Glasner, M. E., Yekta, S., Burge, C. B., and Bartel, D. P. (2003). Vertebrate microRNA genes. Science 299, 1540.

[0016] Mathews, D. H., Sabina, J., Zuker, M., and Turner, D. H. (1999). Expanded sequence dependence of thermodynamic parameters improves prediction of RNA secondary structure. J. Mol. Biol. 288, 911-940.

[0017] Metzler, M., Wilda, M., Busch, K., Viehmann, S., and Borkhardt, A. (2004). High expression of precursor micro RNA-155/BIC RNA in children with Burkitt lymphoma. Genes Chromosomes. Cancer 39, 167-169.

[0018] Michael, M. Z., O'Connor, S. M., Holst Pellekaan, N. G., Young, G. P., and James, R. J. (2003). Reduced accumulation of specific microRNAs in colorectal neoplasia. Mol. Cancer Res. 1, 882-891.

[0019] Reinhart, B. J., Slack, F. J., Basson, M., Pasquinelli, A. E., Bettinger J. C., Rougvie, A. E., Horvitz, H. R., and Ruvkun, G. (2000). The 21-nucleotide let-7 RNA regulates developmental timing in Caenorhabditis elegans. Nature 403, 901-906.

[0020] Southern, E. M. (1992). Detection of specific sequences among DNA fragments separated by gel electrophoresis. 1975. Biotechnology 24, 122-139.

[0021] Tom M. Mitchell, Machine Learning, McGraw Hill, 1997.

[0022] Wightman, B., Ha, I., and Ruvkun, G. (1993). Posttranscriptional regulation of the heterochronic gene lin-14 by lin-4 mediates temporal pattern formation in C. elegans. Cell 75, 855-862.

[0023] Zhang, H., Kolb, F. A., Brondani, V., Billy, E., and Filipowicz, W. (2002). Human Dicer preferentially cleaves dsRNAs at their termini without a requirement for ATP. EMBO J. 21, 5875-5885.

[0024] Zuker, M. (2003). Mfold web server for nucleic acid folding and hybridization prediction. Nucleic Acids Res. 31, 3406-3415.

### BACKGROUND OF INVENTION

[0025] 1. Field of the Invention

[0026] The present invention relates to a group of bioinformatically detectable novel oligonucleotides, here identified as Genomic Address Messenger or GAM oligonucleotides, which are believed to be related to the micro RNA (miRNA) group of oligonucleotides.

[0027] 2. Description of Prior Art

[0028] Micro RNAs (miRNA), are short ˜22 nt non-coding regulatory RNA oligonucleotides, found in a wide range of species, believed to function as specific gene translation repressors, sometimes involved in cell-differentiation.

[0029] The ability to detect novel miRNAs is limited by the methodologies used to detect such oligonucleotides. All miRNAs identified so far either present a visibly discernable whole body phenotype, as do Lin-4 and Let-7 (Wightman,B., Ha, I., and Ruvkun,G., Cell 75:855-862 (1993); Reinhart et al. Nature 403: 901-906 (2000)), or produce sufficient quantities of RNA so as to be detected by the standard molecular biological techniques.

[0030] Studies reporting miRNAs (Lau et al., Science 294:858-862 (2001), Lagos-Quintana et al., Science 294: 853-858 (2001)) discovered 93 miRNAs in several species, by sequencing a limited number of clones (300 by Lau and 100 by Lagos-Quintana) of small segments (i.e. size fractionated) RNA. MiRNAs detected in these studies therefore, represent the more prevalent among the miRNA oligonucleotide family, and can not be much rarer than 1% of all small ˜20 nt-long RNA oligonucleotides.

[0031] The aforesaid studies provide no basis for detection of miRNA oligonucleotides which either do not present a visually discernable whole body phenotype, or are rare (e.g. rarer than 0.1% of all size fractionated ˜20 nt-long RNA segments expressed in the tissues examined), and therefore do not produce significant enough quantities of RNA so as to be detected by standard biological techniques.

[0032] Previous studies on miRNAs and their relation to diseases have suggested potential involvement of several miRNAs in various type of cancers; It has been suggested that mir-15 and mir-16 are associated with B-cell chronic lymphocytic leukemia (Calin, G. A at al., Proc. Natl. Acad. Sci. U. S. A, 2002). More recently, researchers have shown strong evidence for involvement of mir-143 and mir-145 in colorectal neoplasia (Michael, M. Z. et al., Mol. Cancer Res. 1: 882-891 (2003)). Mietzler and colleagues have demonstrated that mir-155, which is located on BIC locus, is highly and differentially expressed in pediatric Burkit lymphoma patients (Metzler, M. at al. Cancer 39: 167-169 (2004)). Involevemnet of miRNAs in Alzheimers disease is unknown.

[0033] The following U.S. Patents relate to bioinformatic detection of genes: U.S. Pat. No. 6,369,195, entitled “Prostatespecific gene for diagnosis, prognosis and management of prostate cancer”, and U.S. Pat. No. 6,291,666 entitled “Spike tissue-specific promoter”, each of which is hereby incorporated by reference herein.

### BRIEF DESCRIPTION OF SEQUENCE LISTING, LARGE TABLES AND COMPUTER PROGRAM LISTING

[0034] A sequence listing is attached to the present invention, comprising 7,351 genomic sequences, is contained in a file named SEQ_LIST.TXT (1,207 KB, 16 Feb. 04), and is hereby incorporated by reference herein.

[0035] Large tables relating to genomic sequences are attached to the present application, appear in 11 table files (size, creation date), incorporated herein: TABLE1.TXT (215 KB, 16 Feb. 04); TABLE2.TXT (16,358 KB, 16 Feb. 04); TABLE3.TXT (134 KB, 16 Feb. 04); TABLE4.TXT (945 KB, 16 Feb. 04), TABLE5.TXT (113 KB, 16 Feb. 04), TABLE6.TXT (189 KB, 16 Feb. 04) and TABLE7.TXT (3,335 KB, 16 Feb. 04), TABLE8.TXT (12,240 KB, 16 Feb. 04), TABLE9.TXT (34,018 KB, 16 Feb. 04), TABLE10.TXT (1,300 KB, 16 Feb. 04) and TABLE11.TXT (2 KB, 16 Feb. 04), all of which are incorporated by reference herein.

[0036] A computer program listing of a computer program constructed and operative in accordance with a preferred embodiment of the present invention is enclosed on an electronic medium in computer readable form, and is hereby incorporated by reference herein The computer program listing is contained in 6 files, the name, sizes and creation date of which are as follows: AUXILARY_FILES.TXT (117K, 14 Nov. 03); BINDING_SITE_SCORING.TXT (17K, 14 Nov. 03); EDIT_DISTANCE.TXT (144K,24 Nov. 03); FIRST-K.TXT (96K, 24 Nov. 03); HAIRPIN_PREDICTION.TXT (47K, 14 Nov. 03); TWO_PHASED_SIDE_SELECTOR.TXT (4K, 14 Nov. 03); and TWO_PHASED_PREDICTOR.TXT (74K, 14 Nov. 03).

### SUMMARY OF INVENTION

[0037] The present invention discloses over a thousand novel regulatory microRNA (miRNA) oligonucleotides referred to here as Genomic Address Messenger (GAM) oligonucleotides, which GAM oligonucleotides are detectable using a novel bioinformatic approach, and go undetected by conventional molecular biology methods. Each GAM oligonucleotide specifically inhibits translation of one of more target genes by hybridization of an RNA transcript encoded by the GAM, to a site located in an untranslated region (UTR) of the mRNA of one or more of the target genes.

[0038] The present invention represents a scientific breakthrough, disclosing novel miRNA oligonucleotides the number of which is dramatically larger than previously believed existed. Prior-art studies reporting miRNAs ((Lau et al., Science 294:858-862 (2001), Lagos-Quintana et al., Science 294: 853-858 (2001)) discovered 93 miRNAs in several species, including 21 in human, using conventional molecular biology methods, such as cloning and sequencing. Bioinformatic detection of miRNA oligonucleotides has not been done prior to the present invention: Despite advanced genome projects, computer-assisted detection of genes encoding functional RNAs remains problematic (Lagos-Quintana et al.,2001).

[0039] Molecular biology methodologies employed by these studies are limited in their ability to detect rare miRNA oligonucleotides, since these studies relied on sequencing of a limited number of clones (300 clones by Lau and 100 clones by Lagos-Quintana) of small segments (i.e. size fractionated) of RNA. MicroRNAs detected in these studies therefore, represent the more prevalent among the miRNA oligonucleotide family, and are typically not be much rarer than 1% of all small ˜20 nt-long RNA oligonucleotides present in the tissue from the RNA was extracted.

[0040] Recent studies state the number of miRNA genes to be limited, and describe the limited sensitivity of available methods for detection of miRNA: The estimate of 255 human genes is an upper bound implying that no more than 40 miRNA genes remain to be identified in mammals (Lim et al., Science, 299:1540 (2003)); Estimates place the total number of vertebrate miRNA genes at about 200-250 (Ambros et al. Curr. Biol. 13:807-818 (2003)); and Confirmation of very low abundance miRNAs awaits the application of detection methods more sensitive than Northern blots (Ambros, 2003).

[0041] The oligonucleotides of the present invention represent a revolutionary new dimension of genomics and of biology: a dimension comprising a huge number of non-protein coding oligonucleotides which modulate expression of thousands of proteins and are associated with numerous major diseases. This new dimension disclosed by the present invention dismantles a central dogma that has dominated life-sciences during the past 50 years, a dogma which has emphasized the importance of protein coding regions of the genome, holding non-protein coding regions to be of little consequence, often dubbing them junk DNA.

[0042] Indeed, only in recent months has this long held belief as to the low importance of non-protein coding regions been vocally challenged. As an example, an article titled The Unseen Genome—Gems in the Junk (Gibbs, W. W. Sci. Am. 289:46-53 (2003)) asserts that the failure to recognize the importance of non-protein- coding regions may well go down as one of the biggest mistakes in the history of molecular biology. Gibbs further asserts that what was dammned as junk because it was not understood, may in fact turn out to be the very basis of human complexity. The present invention provides a dramatic leap in understanding specific important roles of non-protein coding regions.

[0043] An additional scientific breakthrough of the present invention is a novel conceptual model disclosed by the present invention, which conceptual model is preferably used to encode in a genome the determination of cell-differentiation, utilizing oligonucleotides and polynucleotides of the present invention.

[0044] In various preferred embodiments, the present invention seeks to provide an improved method and system for specific modulation of the expression of specific target genes involved in significant human diseases. It also provides an improved method and system for detection of the expression of novel oligonucleotides of the present invention, which modulate these target genes. In many cases the target genes may be known and fully characterized, however in alternative embodiments of the present invention, unknown or less well characterized genes may be targeted.

[0045] Accordingly, the invention provides several substantially pure nucleic acids (e.g., genomic DNA, cDNA or synthetic DNA) each comprising a novel GAM oligonucleotide, vectors comprising the DNAs, probes comprising the DNAs, a method and system for selectively modulating translation of known target genes utilizing the vectors, and a method and system utilizing the GAM probes to modulate expression of target genes.

[0046] A Nucleic acid is defined as a ribonucleic acid (RNA) molecule, or a deoxyribonucleic acid (DNA) molecule, or complementary deoxyribonucleic acid (cDNA), comprising either naturally occurring nucleotides or non-naturally occurring nucleotides.

[0047] Substantially pure nucleic acid, Isolated Nucleic Acid, Isolated Oligoucleotide and Isolated Polynucleotide are defined as a nucleic acid that is free of the genome of the organism from which the nucleic acid is derived, and include, for example, a recombinant nucleic acid which is incorporated into a vector, into an autonomously replicating plasmid or virus, or into the genomic nucleic acid of a prokaryote or eukaryote at a site other than its natural site; or which exists as a separate molecule (e.g., a cDNA or a genomic or cDNA fragment produced by PCR or restriction endonuclease digestion) independent of other nucleic acids.

[0048] An Oligonucleotide is defined as a nucleic acid comprising 2-139 nucleotides, or preferably 16-120 nucleotides. A Polynucleotide is defined as a nucleic acid comprising 140-5000 nucleotides, or preferably 140-1000 nucleotides.

[0049] A Complementary sequence is defined as a first nucleotide sequence which reverse complementary of a second nucleotide sequence: the first nucleotide sequence is reversed relative to a second nucleotide sequence, and wherein each nucleotide in the first nucleotide sequence is complementary to a corresponding nucleotide in the second nucleotide sequence (e.g. ATGGC is the complementary sequence of GCCAT).

[0050] Hybridization, Binding and Annealing are defined as hybridization, under in-vivo physiologic conditions, of a first nucleic acid to a second nucleic acid, which second nucleic acid is at least partially complementary to the first nucleic acid.

[0051] A Hairpin Sturucture is defined as an oligonucleotide having a nucleotide sequence that is 50-140 nucleotides in length, the first half of which nucleotide sequence is at least partially complementary to the second part thereof, thereby causing the nucleic acid to fold onto itself, forming a secondary hairpin structure.

[0052] A Hairpin Shaped Precursor is defined as a Hairpin Structure which is processed by a Dicer enzyme complex, yielding an oligonucleotide which is about 19 to about 24 nucleotides in length.

[0053] “Inhibiting translation” is defined as the ability to prevent synthesis of a specific protein encoded by a respective gene by means of inhibiting the translation of the mRNA of this gene. For example, inhibiting translation may include the following steps: (1) a DNA segment encodes an RNA, the first half of whose sequence is partially complementary to the second half thereof; (2) the precursor folds onto itself forming a hairpin-shaped precursor; (3) a Dicer enzyme complex cuts the hairpin shaped precursor yielding an oligonucleotide that isapproximately 22 nt in length; (4) the oligonucleotide binds complementarily to at least one binding site, having a nucleotide sequence that is at least partially complentary to the oligonucleotide, which binding site is located in the mRNA of a target gene, preferably in the untranslated region (UTR) of a target gene, such that the binding inhibts translation of the target protein.

[0054] A “Translation inhibitor site” is defined as the minimal DNA sequence sufficient to inhibit translation.

[0055] There is thus provided in accordance with a preferred embodiment of the present invention a bioinformatically detectable isolated oligonucleotide which is endogenously processed from a hairpin-shaped precursor, and anneals to a portion of a mRNA transcript of a target gene, wherein binding of the oligonucleotide to the mRNA transcript represses expression of the target gene, and wherein the oligonucleotide has at least 80% sequence identity with a nucleotide sequence selected from the group consisting of SEQ ID NOs: 1-2686.

[0056] There is still further provided in accordance with another preferred embodiment of the present invention a bioinformatically detectable isolated oligonucleotide which is endogenously processed from a hairpin-shaped precursor, and anneals to a portion of a mRNA transcript of a target gene selected from the group consisting of genes shown in Table 11, Row 1, wherein binding of the oligonucleotide to the mRNA transcript represses expression of the target gene, and wherein the oligonucleotide has at least 80% sequence identity with a nucleotide sequence selected from the group consisting of SEQ ID NOs: 1-2686.

[0057] There is additionally provided in accordance with another preferred embodiment of the present invention a bioinformatically detectable isolated oligonucleotide having a nucleotide sequence selected from the group consisting of SEQ ID NOs: 1-2686.

[0058] There is moreover provided in accordance with another preferred embodiment of the present invention a bioinformatically detectable first oligonucleotide which is a portion of a mRNA transcript of a target gene, and anneals to a second oligonucleotide that is endogenously processed from a hairpin precursor, wherein binding of the first oligonucleotide to the second oligonucleotide represses expression of the target gene, and wherein nucleotide sequence of the second nucleotide is selected from the group consisting of SEQ ID NOs: 1-2686.

[0059] There is further provided in accordance with another preferred embodiment of the present invention a bioinformatically detectable first oligonucleotide which is a portion of a mRNA transcript of a target gene selected from the group consisting of genes shown in Table 11 row 1, and anneals to a second oligonucleotide that is endogenously processed from a hairpin precursor, wherein binding of the first oligonucleotide to the second oligonucleotide represses expression of the target gene, and wherein nucleotide sequence of the second nucleotide is selected from the group consisting of SEQ ID NOs: 1-2686.

[0060] There is still further provided in accordance with another preferred embodiment of the present invention a bioinformatically detectable oligonucleotide having a nucleotide sequence selected from the group consisting of SEQ ID NOs: 1-2686.

[0061] There is additionally provided in accordance with another preferred embodiment of the present invention a bioinformatically detectable isolated oligonucleotide which is endogenously processed from a hairpin-shaped precursor, and anneals to a portion of a mRNA transcript of a target gene associated with Alzheimers disease, wherein binding of the oligonucleotide to the mRNA transcript represses expression of the target gene.

[0062] There is moreover provided in accordance with another preferred embodiment of the present invention a bioinformatically detectable isolated oligonucleotide which is endogenously processed from a hairpin-shaped precursor, and anneals to a portion of a mRNA transcript of a target gene that is differentially expressed in a tissue affected by Alzheimers disease relative an unaffected tissue, wherein binding of the oligonucleotide to the mRNA transcript represses expression of the target gene.

[0063] There is further provided in accordance with another preferred embodiment of the present invention a bioinformatically detectable isolated oligonucleotide which is endogenously processed from a hairpin-shaped precursor, and anneals to a portion of a mRNA transcript of a target gene, the expression of which target gene correlates with Alzheimers disease or susceptibility thereto, wherein binding of the oligonucleotide to the mRNA transcript represses expression of the target gene.

[0064] There is still further provided in accordance with another preferred embodiment of the present invention a bioinformatically detectable isolated oligonucleotide which is endogenously processed from a hairpin-shaped precursor, and anneals to a portion of a mRNA transcript of a target gene responsible for the formation of Alzheimers disease, wherein binding of the oligonucleotide to the mRNA transcript represses expression of the target gene.

[0065] There is additionally provided in accordance with another preferred embodiment of the present invention a bioinformatically detectable isolated oligonucleotide which anneals to a portion of a mRNA transcript of a target gene selected from the group consisting of: ACE, ACT, ADAM10, ADAM17, ADAMTS5, APBA1, APBA2, APBB2, APLP1, APLP2, APOC1, APP, APPBP2, ARHA, AVP, BACE, BACE2, BCHE, BLMH, CASP3, CAV1, CAV2, CHAT, CNTF, CRH, CRYAB, CTNND2, CTSB, CTSK, DHCR24, DLST, DSCR1, FHL2, FLNB, FOS, GFAP, GLUL, GSK3B, GYPA, HADH2, HD, HTR2A, HTR2C, IAPP, IGF1, IL1A, LRP1, MAPK10, MAPT, MME, MPO, MT3, MTNR1A, NCKAP1, NCSTN, NGB, OGDH, OLR1, PLAU, PRND, PSEN1, PSEN2, RAGE, S100B, SERPINA3, SLC17A7, SLC6A4, SNCA, SNCAIP, TGFB1, TNF, TNFRSF5, TNFRSF6, TRPM2 and UBB, wherein binding of the oligonucleotide to the mRNA transcript represses expression of the target gene.

[0066] There is moreover provided in accordance with another preferred embodiment of the present invention a bioinformatically detectable isolated oligonucleotide which is endogenously processed from a hairpin-shaped precursor, and anneals to a portion of a mRNA transcript of a target gene selected from the group consisting of: ACE, ACT, ADAM10, ADAM17, ADAMTS5, APBA1, APBA2, APBB2, APLP1, APLP2, APOC1, APP, APPBP2, ARHA, AVP, BACE, BACE2, BCHE, BLMH, CASP3, CAV1, CAV2, CHAT, CNTF, CRH, CRYAB, CTNND2, CTSB, CTSK, DHCR24, DLST, DSCR1, FHL2, FLNB, FOS, GFAP, GLUL, GSK3B, GYPA, HADH2, HD, HTR2A, HTR2C, IAPP, IGF1, IL1A, LRP1, MAPK10, MAPT, MME, MPO, MT3, MTNR1A, NCKAP1, NCSTN, NGB, OGDH, OLR1, PLAU, PRND, PSEN1, PSEN2, RAGE, S100B, SERPINA3, SLC17A7, SLC6A4, SNCA, SNCAIP, TGFB1, TNF, TNFRSF5, TNFRSF6, TRPM2 and UBB, wherein binding of the oligonucleotide to the mRNA transcript represses expression of the target gene.

[0067] There is further provided in accordance with another preferred embodiment of the present invention a bioinformatically detectable isolated oligonucleotide which anneals to a portion of a mRNA transcript of a target gene associated with Alzheimers disease, which target gene is selected from the group consisting of: ACE, ACT, ADAM10, ADAM17, ADAMTS5, APBA1, APBA2, APBB2, APLP1, APLP2, APOC1, APP, APPBP2, ARHA, AVP, BACE, BACE2, BCHE, BLMH, CASP3, CAV1, CAV2, CHAT, CNTF, CRH, CRYAB, CTNND2, CTSB, CTSK, DHCR24, DLST, DSCR1, FHL2, FLNB, FOS, GFAP, GLUL, GSK3B, GYPA, HADH2, HD, HTR2A, HTR2C, IAPP, IGF1, IL1A, LRP1, MAPK10, MAPT, MME, MPO, MT3, MTNR1A, NCKAP1, NCSTN, NGB, OGDH, OLR1, PLAU, PRND, PSEN1, PSEN2, RAGE, S100B, SERPINA3, SLC17A7, SLC6A4, SNCA, SNCAIP, TGFB1, TNF, TNFRSF5, TNFRSF6, TRPM2 and UBB, wherein binding of the oligonucleotide to the mRNA transcript represses expression of the target gene, and wherein the oligonucleotide has at least 80% sequence identity with a nucleotide sequence selected from the group consisting of: (a) a sequence selected from the group consisting of SEQ ID NOs: 1-36 and 37-2686, and (b) the complement of a sequence selected from the group consisting of SEQ ID NOs: 2845, 3016, 3025, 3095, 3164, 3258, 3303, 3304, 3465, 3499, 3547, 3594, 3631, 4058, 4059, 4261, 4340, 4343, 4384, 4397, 4419, 4448, 4603, 4616, 4709, 4825, 4843, 4862, 4881, 4896, 5050, 5325, 5394, 5450, 5458, 5471 and 2687-5643.

[0068] There is still further provided in accordance with another preferred embodiment of the present invention a bioinformatically detectable isolated oligonucleotide which anneals to a portion of a mRNA transcript of a target gene selected from the group consisting of: ACE, ACT, ADAM10, ADAM17, ADAMTS5, APBA1, APBA2, APBB2, APLP1, APLP2, APOC1, APP, APPBP2, ARHA, AVP, BACE, BACE2, BCHE, BLMH, CASP3, CAV1, CAV2, CHAT, CNTF, CRH, CRYAB, CTNND2, CTSB, CTSK, DHCR24, DLST, DSCR1, FHL2, FLNB, FOS, GFAP, GLUL, GSK3B, GYPA, HADH2, HD, HTR2A, HTR2C, IAPP, IGF1, IL1A, LRP1, MAPK10, MAPT, MME, MPO, MT3, MTNR1A, NCKAP1, NCSTN, NGB, OGDH, OLR1, PLAU, PRND, PSEN1, PSEN2, RAGE, S100B, SERPINA3, SLC17A7, SLC6A4, SNCA, SNCAIP, TGFB1, TNF, TNFRSF5, TNFRSF6, TRPM2 and UBB, wherein binding of the oligonucleotide to the mRNA transcript represses expression of the target gene, and wherein the oligonucleotide has at least 80% sequence identity with a nucleotide sequence selected from the group consisting of SEQ ID NOs: 1-36 and 37-2686.

[0069] There is additionally provided in accordance with another preferred embodiment of the present invention a bioinformatically detectable isolated oligonucleotide which includes from about 19 to about 22 nucleotides, which nucleotides are partially complementary to a target gene selected form the group consisting of: ACE, ACT, ADAM10, ADAM17, ADAMTS5, APBA1, APBA2, APBB2, APLP1, APLP2, APOC1, APP, APPBP2, ARHA, AVP, BACE, BACE2, BCHE, BLMH, CASP3, CAV1, CAV2, CHAT, CNTF, CRH, CRYAB, CTNND2, CTSB, CTSK, DHCR24, DLST, DSCR1, FHL2, FLNB, FOS, GFAP, GLUL, GSK3B, GYPA, HADH2, HD, HTR2A, HTR2C, IAPP, IGF1, IL1A, LRP1, MAPK10, MAPT, MME, MPO, MT3, MTNR1A, NCKAP1, NCSTN, NGB, OGDH, OLR1, PLAU, PRND, PSEN1, PSEN2, RAGE, S100B, SERPINA3, SLC17A7, SLC6A4, SNCA, SNCAIP, TGFB1, TNF, TNFRSF5, TNFRSF6, TRPM2 and UBB, and wherein the oligonucleotide is endogenously processed from a hairpin-form precursor, and includes at least 19 contiguous nucleotides from a sequence selected from the group consisting of SEQ ID NOs: 1-36 and 37-2686.

[0070] There is moreover provided in accordance with another preferred embodiment of the present invention a bioinformatically detectable first oligonucleotide which is a portion of a mRNA transcript of a target gene selected from the group consisting of: ACE, ACT, ADAM10, ADAM17, ADAMTS5, APBA1, APBA2, APBB2, APLP1, APLP2, APOC1, APP, APPBP2, ARHA, AVP, BACE, BACE2, BCHE, BLMH, CASP3, CAV1, CAV2, CHAT, CNTF, CRH, CRYAB, CTNND2, CTSB, CTSK, DHCR24, DLST, DSCR1, FHL2, FLNB, FOS, GFAP, GLUL, GSK3B, GYPA, HADH2, HD, HTR2A, HTR2C, IAPP, IGF1, IL1A, LRP1, MAPK10, MAPT, MME, MPO, MT3, MTNR1A, NCKAP1, NCSTN, NGB, OGDH, OLR1, PLAU, PRND, PSEN1, PSEN2, RAGE, S100B, SERPINA3, SLC17A7, SLC6A4, SNCA, SNCAIP, TGFB1, TNF, TNFRSF5, TNFRSF6, TRPM2 and UBB, and anneals to a second oligonucleotide that is endogenously processed from a hairpin precursor, wherein binding of the first oligonucleotide to the second oligonucleotide represses expression of the target gene.

[0071] There is further provided in accordance with another preferred embodiment of the present invention a bioinformatically detectable first oligonucleotide which is a portion of a mRNA transcript of a target gene selected from the group consisting of: ACE, ACT, ADAM10, ADAM17, ADAMTS5, APBA1, APBA2, APBB2, APLP1, APLP2, APOC1, APP, APPBP2, ARHA, AVP, BACE, BACE2, BCHE, BLMH, CASP3, CAV1, CAV2, CHAT, CNTF, CRH, CRYAB, CTNND2, CTSB, CTSK, DHCR24, DLST, DSCR1, FHL2, FLNB, FOS, GFAP, GLUL, GSK3B, GYPA, HADH2, HD, HTR2A, HTR2C, IAPP, IGF1, IL1A, LRP1, MAPK10, MAPT, MME, MPO, MT3, MTNR1A, NCKAP1, NCSTN, NGB, OGDH, OLR1, PLAU, PRND, PSEN1, PSEN2, RAGE, S100B, SERPINA3, SLC17A7, SLC6A4, SNCA, SNCAIP, TGFB1, TNF, TNFRSF5, TNFRSF6, TRPM2 and UBB, and anneals to a second oligonucleotide that is endogenously processed from a hairpin precursor, wherein binding of the first oligonucleotide to the second oligonucleotide represses expression of the target gene, and wherein nucleotide sequence of the second nucleotide is selected from the group consisting of SEQ ID NOs: 1-36 and 37-2686.

[0072] There is still further provided in accordance with another preferred embodiment of the present invention a bioinformatically detectable isolated oligonucleotide which anneals to a portion of a mRNA transcript of APP gene, wherein binding of the oligonucleotide to the mRNA transcript represses expression of APP gene. There is additionally provided in accordance with another preferred embodiment of the present invention a bioinformatically detectable isolated oligonucleotide which is endogenously processed from a hairpin-shaped precursor, and anneals to a portion of a mRNA transcript of APP gene, wherein binding of the oligonucleotide to the mRNA transcript represses expression of APP gene.

[0073] There is moreover provided in accordance with another preferred embodiment of the present invention a bioinformatically detectable isolated oligonucleotide which anneals to a portion of a mRNA transcript of APP gene, wherein binding of the oligonucleotide to the mRNA transcript represses expression of APP gene, and wherein the oligonucleotide has at least 80% sequence identity with a nucleotide sequence selected from the group consisting of: (a) a sequence selected from the group consisting of SEQ ID NOs: 2,31 and 416-427, and (b) the complement of a sequence selected from the group consisting of SEQ ID NOs: 3107, 3113 and 3106-3121.

[0074] There is further provided in accordance with another preferred embodiment of the present invention a bioinformatically detectable isolated oligonucleotide which anneals to a portion of a mRNA transcript of APP gene, wherein binding of the oligonucleotide to the mRNA transcript represses expression of APP gene, and wherein the oligonucleotide has at least 80% sequence identity with a nucleotide sequence selected from the group consisting of SEQ ID NOs: 2, 31 and 416-427.

[0075] There is still further provided in accordance with another preferred embodiment of the present invention a bioinformatically detectable isolated oligonucleotide which is endogenously processed from a hairpin-shaped precursor, and anneals to a complementary portion of a mRNA transcript of APP gene, wherein binding of the oligonucleotide to the mRNA transcript represses expression of APP gene, and wherein the oligonucleotide has at least 80% sequence identity with a nucleotide sequence selected from the group consisting of SEQ ID NOs: 2, 31 and 416-427.

[0076] There is additionally provided in accordance with another preferred embodiment of the present invention a bioinformatically detectable isolated oligonucleotide which includes from about 19 to about 22 nucleotides, which nucleotides anneal to a portion of a mRNA transcript of APP gene, and wherein the oligonucleotide is endogenously processed from a hairpin-form precursor, and includes at least 19 contiguous nucleotides from a sequence selected from the group consisting of SEQ ID NOs: 2, 31 and 416-427.

[0077] There is moreover provided in accordance with another preferred embodiment of the present invention a bioinformatically detectable first oligonucleotide which is a portion of a mRNA transcript of APP gene, and anneals to a second oligonucleotide that is endogenously processed from a hairpin precursor, wherein binding of the first oligonucleotide to the second oligonucleotide represses expression of the target gene.

[0078] There is further provided in accordance with another preferred embodiment of the present invention a bioinformatically detectable first oligonucleotide which is a portion of a mRNA transcript of APP gene, and anneals to a second oligonucleotide that is endogenously processed from a hairpin precursor, wherein binding of the first oligonucleotide to the second oligonucleotide represses expression of the target gene, and wherein nucleotide sequence of the second nucleotide is selected from the group consisting of SEQ ID NOs: 2, 31 and 416-427.

[0079] There is still further provided in accordance with another preferred embodiment of the present invention a bioinformatically detectable isolated polynucleotide which is endogenously processed into a plurality of hairpin shaped precursor oligonucleotides, each of which is endogenously processed into a respective oligonucleotide, which in turn anneals to a portion of a mRNA transcript of a target gene, wherein binding of the oligonucleotide to the mRNA transcript represses expression of the target gene.

[0080] There is additionally provided in accordance with another preferred embodiment of the present invention a bioinformatically detectable isolated oligonucleotide which is endogenously processed from a hairpin-shaped precursor, and anneals to a portion of a mRNA transcript of a target gene, wherein binding of the oligonucleotide to the mRNA transcript represses expression of the target gene, and wherein the target gene does not encode a protein.

[0081] There is moreover provided in accordance with another preferred embodiment of the present invention a bioinformatically detectable isolated oligonucleotide which is endogenously processed from a hairpin-shaped precursor, and anneals to a portion of a mRNA transcript of a target gene, wherein binding of the oligonucleotide to the mRNA transcript represses expression of the target gene, and wherein a function of the oligonucleotide includes modulation of cell type.

[0082] There is further provided in accordance with another preferred embodiment of the present invention a bioinformatically detectable isolated oligonucleotide which is endogenously processed from a hairpin-shaped precursor, and anneals to a portion of a mRNA transcript of a target gene, wherein binding of the oligonucleotide to the mRNA transcript represses expression of the target gene, and wherein the oligonucleotide is maternally transferred by a cell to at least one daughter cell of the cell, and a function of the oligonucleotide includes modulation of cell type of the daughter cell.

[0083] There is still further provided in accordance with another preferred embodiment of the present invention a method for bioinformatic detection of microRNA oligonucleotides, the method including: bioinformatically detecting a hairpin shaped precursor oligonucleotide, bioinformatically detecting an oligonucleotide which is endogenously processed from the hairpin shaped precursor oligonucleotide, and bioinformatically detecting a target gene of the oligonucleotide wherein the oligonucleotide anneals to at least one portion of a mRNA transcript of the target gene, and wherein the binding represses expression of the target gene, and the target gene is associated with a disease.

### BRIEF DESCRIPTION OF DRAWINGS

[0084] FIG. 1 is a simplified diagram illustrating a genomic differentiation enigma that the present invention addresses;

[0085] FIGS. 2, 3 and 4 are schematic diagrams which, when taken together, provide an analogy that illustrates a conceptual model of the present invention, addressing the genomic differentiation enigma;

[0086] FIGS. 5A and 5B are schematic diagrams, which when taken together, illustrate a ‘genomic records’ concept of the conceptual model of the present invention, addressing the genomic differentiation enigma;

[0087] FIG. 6 is a schematic diagram illustrating a ‘genomically programmed cell differentiation’ concept of the conceptual model of the present invention, addressing the genomic differentiation enigma;

[0088] FIG. 7 is a schematic diagram illustrating a ‘genomically programmed cell-specific protein expression modulation’ concept of the conceptual model of the present invention, addressing the genomic differentiation enigma;

[0089] FIG. 8 is a simplified diagram illustrating a mode by which an oligonucleotide of a novel group of oligonucleotides of the present invention, modulates expression of known target genes;

[0090] FIG. 9 is a simplified block diagram illustrating a bioinformatic oligonucleotide detection system capable of detecting oligonucleotides of the novel group of oligonucleotides of the present invention, which system is constructed and operative in accordance with a preferred embodiment of the present invention;

[0091] FIG. 10 is a simplified flowchart illustrating operation of a mechanism for training of a computer system to recognize the novel oligonucleotides of the present invention, which mechanism is constructed and operative in accordance with a preferred embodiment of the present invention;

[0092] FIG. 11A is a simplified block diagram of a non-coding genomic sequence detector constructed and operative in accordance with a preferred embodiment of the present invention;

[0093] FIG. 11B is a simplified flowchart illustrating operation of a non-coding genomic sequence detector constructed and operative in accordance with a preferred embodiment of the present invention;

[0094] FIG. 12A is a simplified block diagram of a hairpin detector constructed and operative in accordance with a preferred embodiment of the present invention;

[0095] FIG. 12B is a simplified flowchart illustrating operation of a hairpin detector constructed and operative in accordance with a preferred embodiment of the present invention;

[0096] FIG. 13A is a simplified block diagram of a dicer-cut location detector constructed and operative in accordance with a preferred embodiment of the present invention;

[0097] FIG. 13B is a simplified flowchart illustrating training of a dicer-cut location detector constructed and operative in accordance with a preferred embodiment of the present invention;

[0098] FIG. 13C is a simplified flowchart illustrating operation of a dicer-cut location detector constructed and operative in accordance with a preferred embodiment of the present invention;

[0099] FIG. 14A is a simplified block diagram of a target gene binding-site detector constructed and operative in accordance with a preferred embodiment of the present invention;

[0100] FIG. 14B is a simplified flowchart illustrating operation of a target gene binding-site detector constructed and operative in accordance with a preferred embodiment of the present invention;

[0101] FIG. 15 is a simplified flowchart illustrating operation of a function & utility analyzer constructed and operative in accordance with a preferred embodiment of the present invention;

[0102] FIG. 16 is a simplified diagram describing a novel bioinformatically detected group of regulatory polynucleotides referred to here as Genomic Record (GR) polynucleotide, each of which encodes an ‘operon-like’ cluster of novel miRNA-like oligonucleotides, which in turn modulates expression of one or more target genes;

[0103] FIG. 17 is a simplified diagram illustrating a mode by which oligonucleotides of a novel group of operon-like polynucleotide of the present invention, modulate expression of other such polyonucleotides, in a cascading manner;

[0104] FIG. 18 is a block diagram illustrating an overview of a methodology for finding novel oligonucleotides and novel operon-like polynucleotides of the present invention, and their respective functions;

[0105] FIG. 19 is a block diagram illustrating different utilities of novel oligonucleotides and novel operon-like polynucleotides, both of the present invention;

[0106] FIGS. 20A and 20B are simplified diagrams, which when taken together illustrate a mode of oligonucleotide-therapy applicable to novel oligonucleotides of the present invention;

[0107] FIG. 21A is a histogram representing the distribution of known miRNA oligonucleotides, and that of miRNA-like hairpin-shaped oligonucleotides, predicted by the bioinformatics detection engine of the present invention, extracted from expressed genome sequences with respect to their hairpin detector score.

[0108] FIG. 21B is a table summarizing laboratory validation results which validate efficacy of a bioinformatic oligonucleotide detection system constructed and operative in accordance with a preferred embodiment of the present invention;

[0109] FIG. 22A and FIG. 22B are a picture and a summary table of laboratory results validating the expression of 43 novel oligonucleotides detected by a bioinformatic oligonucleotide detection engine constructed and operative in accordance with a preferred embodiment of the present invention, thereby validating the efficacy of the oligonucleotide detection engine of the present invention;

[0110] FIG. 23A is a schematic representation of an “operon-like” cluster of novel hairpin sequences detected bioinformatically by a bioinformatic oligonucleotide detection engine constructed and operative in accordance with a preferred embodiment of the present invention, and non-GAM hairpin useful as negative controls thereto;

[0111] FIG. 23B is a schematic representation of secondary folding of hairpins of the operon-like cluster of FIG. 23A;

[0112] FIG. 23C is a picture of laboratory results demonstrating expression of novel oligonucleotides of FIGS. 23A and 23B, and lack of expression of the negative controls, thereby validating efficacy of bioinformatic detection of GAM oligonucleotides and GR polynucleotides of the present invention, by a bioinformatic oligonucleotide detection engine constructed and operative in accordance with a preferred embodiment of the present invention;

[0113] FIG. 24A, is an annotated sequence of EST72223 comprising known miRNA oligonucleotide MIR98 and novel oligonucleotide GAM25 PRECURSOR detected by the oligonucleotide detection system of the present invention; and

[0114] FIGS. 24B, 24C and 24D are pictures of laboratory results, which when taken together demonstrate laboratory confirmation of expression of known oligonucleotide MIR98 and of novel bioinformatically detected GAM25 RNA respectively, both of FIG. 24A, thus validating the bioinformatic oligonucleotide detection system of the present invention.

### BRIEF DESCRIPTION OF SEQUENCES

[0115] A Sequence Listing of genomic sequences of the present invention designated SEQ ID NO: 1 through SEQ ID NO: 7,351 is attached to this application, and is hereby incorporated herein. The genomic listing comprises the following nucleotide sequences: nucleotide sequences of 1708 GAMs precursors of respective novel oligonucleotides of the present invention; nucleotide sequences of 2686 GAM RNA oligonucleotides of respective novel DNA oligonucleotides of the present invention; and nucleotide sequences of 2957 target gene binding sites of respective novel oligonucleotides of the present invention.

### DETAILED DESCRIPTION

[0116] Reference is now made to FIG. 1 which is a simplified diagram providing a conceptual explanation of a genomic differentiation enigma, which the present invention addresses, inter alia.

[0117] FIG. 1 depicts various types of cells in an organism, such as a cartilage cell designated by reference numeral 1, a liver cell designated by reference numeral 2, a fibroblast cell designated by reference numeral 3, and a bone cell designated by reference numeral 4, all containing identical DNA designated by reference numeral 5. Notwithstanding that the various types of cells are all derived from an initial fertilized egg cell designated by reference numeral 6, each of these cells expresses different proteins and accordingly acquires a different shape and function.

[0118] The present invention proposes inter alia that the inevitable conclusion from the foregoing is, however, strikingly simple: The genome must contain a modular differentiation coding system. The genome of each cell must include multiple modules or records, possibly a different one for each cell type, as well as a mechanism causing each cell at its inception to be instructed which one of the multiple records governs its behavior.

[0119] This modular code concept may be somewhat difficult to grasp, since most persons are accustomed to view things from an external viewpoint. An architect, for example, looks at a plan of a building, which details exactly where each element (block, window, door, electrical switch, etc.) is to be placed relative to all other elements, and, using the plan, instructs builders to place these elements in their designated places. This is an example of an external viewpoint: The architect is external to the plan, which itself is external with respect to the physical building, and with respect to its various elements. The architect may therefore act as an “external organizing agent”: seeing the full picture and the relationships between all elements, and being able to instruct from the outside where to place each of them.

[0120] According to a preferred embodiment of the present invention, genomic differentiation coding works differently, without any such external organizing agent. It comprises a smart block (the first cell), which is the architect and the plan, and which continuously duplicates itself, somehow knowing when to manifest itself as a block and when as a window, door, or electrical switch.

[0121] Reference is now made to FIGS. 2A-4 which are schematic diagrams which, when taken together, provide an analogy that illustrates a conceptual model of the present invention, addressing the genomic differentiation enigma.

[0122] Reference is now made to FIG. 2A. An imaginary talented chef, designated by reference numeral 7, is capable of preparing any meal provided that he is given specific written cooking instructions. This chef 7 is equipped with two items: (a) a thick recipe book, designated by reference numeral 8, and (b) a small note, designated by reference numeral 9, having a number scribbled on it. The recipe book 8 comprises multiple pages, each page detailing how to prepare a specific meal. The small note 9 indicates the page to be opened, and therefore the meal to be prepared. The chef looks at the page number written on the note, opens the recipe book to the appropriate page, and prepares the meal according to the written instructions on this page. In the example shown in FIG. 2A, the chef 7 is holding a small note 9 bearing the number 127. He therefore opens the book to page 127, as designated by reference numeral 10. Since this page contains the recipe for preparing bread, the chef 7 prepares a loaf of bread, designated by reference numeral 12. Pages of the book, such as page 10 in the example shown in FIG. 2A, contains additional information, designated by reference numeral 11 which additional data is further elaborated hereinbelow with reference to FIGS. 3 and 4.

[0123] Reference is now made to FIG. 2B, which depicts two identical chefs, a first chef, designated by reference numeral 13, and a second chef, designated by reference numeral 14, both holding an identical recipe book, designated by reference numeral 8. Although the first chef 13 and the second chef 14 are identical, and hold identical recipe books 8, they differ in that they hold different small notes: the first chef 13 holds a small note designated by reference numeral 9, having the number 127 written on it, whereas the second chef 14 holds a small note designated by reference numeral 15, having the number 134 written on it. Accordingly, the first chef 13 opens the book 8 to page 127, as designated by reference numeral 10 and, based on the instructions written on page 127 prepares a loaf of bread, designated by reference numeral 12. The second chef 14 opens the book 8 to page 134, as designated by reference numeral 16 and, based on the instructions written on page 134, prepares a pie, designated by reference numeral 17. Pages in the book, such as pages 10 and 16 in the examples shown in FIG. 2B, contain additional information, designated by reference numeral 11 which additional information is further elaborated hereinbelow with reference to FIGS. 3 and 4.

[0124] Reference is now made to FIG. 3 which illustrates a mode by which an imaginary chef can duplicate himself yielding two identical chefs, instructing each of the identical duplicate chefs to prepare a different meal. As an example, FIG. 3 shows chef 21 duplicating himself, yielding two duplicate chefs: a first duplicate chef designated by reference numeral 22 and a second duplicate chef designated by reference numeral 23. The duplicate chefs are identical to each other and to chef 21.

[0125] Like chefs 7 and 13 (FIG. 2A and 2B), FIG. 3 shows chef 21 holding a recipe book 8 and receiving a note 9 bearing the number 127. The chef 21 therefore opens the book 8 to page 127, as designated by reference numeral 10, and prepares a loaf of bread 12. However, FIG. 3 also elaborates some of the additional information 11 (FIGS. 2A and 2B) found in page 10: the bottom of page 10, bears two numbers, 134 and 157.

[0126] Chef 21 is trained to perform the following three actions when he is finished preparing a meal: (a) Duplicate himself yielding two duplicate chefs, the first duplicate chef 22 and the second duplicate chef 23; (b) Duplicate his recipe book 8, handing an identical copy to each of the duplicate chefs 22 and 23; and (c) Write down the numbers found at the bottom of the page he was instructed to open the book to. In the example of chef 21, since he was instructed to open the book to page 10, he writes the numbers 134 and 157 on two respective notes designated by reference numerals 15 and 24, and hands note 15 bearing the number 134 to the first duplicate chef 22 and note 24 bearing the number 157 to the second duplicate chef 23.

[0127] Accordingly, the first duplicate chef 22 receives note 15 bearing the number 134 and therefore opens the recipe book 8 to page 134, as designated by reference numeral 16, and prepares a pie, designated by reference numeral 17. The second duplicate chef 23 receives note 24 bearing the number 157 and therefore opens the recipe book 8 to page 157, as designated by reference numeral 25, and prepares rice, designated by reference numeral 26.

[0128] It is appreciated that while chef 21 and duplicate chefs 22 and 23 are identical and hold identical recipe books 8, they each prepare a different meal. It is also appreciated that the meals prepared by the first duplicate chef 22 and the second duplicate chef 23 are determined by chef 21, and are mediated by the differently numbered notes 15 and 24 passed on from chef 21 to duplicate chefs 22 and 23 respectively.

[0129] It is further appreciated that the mechanism illustrated by FIG. 3 enables an unlimited lineage of chefs to divide into duplicate, identical chefs and to determine the meals those duplicate chefs would prepare. As an example, since the first duplicate chef 22 is directed to page 134, as designated by reference numeral 16, when he duplicates himself (not shown), he will instruct his two duplicate chefs to prepare meals specified on pages the numbers of which are written at the bottom of page 134, i.e. pages 114 and 193 respectively. Similarly, the second duplicate chef 23 will instruct its duplicate chefs to prepare meals specified on pages 121 and 146 respectively, etc.

[0130] Reference is now made to FIG. 4, which illustrates a mode by which a chef can prepare a meal based on instructions written in a shorthand format: The main meal-page to which a chef is directed by a small note he is given, merely contains a list of numbers which further direct him to other pages, each specifying how to prepare an ingredient of that meal.

[0131] To illustrate this shorthand format FIG. 4 shows a chef, designated by reference numeral 27, holding the recipe book 8 and the note 9 which bears the number 127. The chef 27 accordingly opens the recipe book 8 to page 127, as designated by reference numeral 10, and based on instructions on this page prepares bread 12. This is similar to chefs 7, 13 and 21 of FIGS. 2A, 2B and 3 respectively.

[0132] However, FIG. 4 also further elaborates some of the additional information 11 (FIGS. 2A and 2B) found in page 10. FIG. 4 shows the cooking “instructions” found on page 10 for making bread 12 written in a shorthand format, comprising only three numbers, 118, 175 and 183. The chef 27 writes these numbers on three respective notes designated by reference numerals 28-30. The notes 28-30 are then used to turn to corresponding pages 31-33 of the book 8, which pages provide instructions for preparation of ingredients required for making bread 12: flour 34, milk 35 and salt 36.

[0133] The analogy provided by FIGS. 2A-4 illustrates the conceptual model of the present invention addressing the genomic differentiation enigma, and may be explained as follows: The chefs and duplicate chefs 7, 13, 14, 21-23 and 27 (FIGS. 2A-4) in the given analogy represents cells. The thick recipe book 8 represents the DNA 5 (FIG. 1). Preparing meals such as bread 12, pie 17 or rice 16 (all of FIG. 3) represent the cell manifesting itself as a specific cell-type, such as cartilage cell 1, liver cell 2, fibroblast cell 3, and bone cell 4 (all of FIG. 1). Ingredients of a meal, such as flour 34, milk 35 and salt 36 (all of FIG. 4), represent proteins typically expressed by a cell of a certain cell-type, such as 1-4. Like the different chefs of the analogy, having the same thick recipe book 8 yet preparing different meals, so do different cells in an organism contain the same DNA 5 yet manifest themselves as different cell types, such as 1-4, expressing proteins typical of these respective cell types. Application of analogy of FIGS. 2A-4 to cell-biology is further described hereinbelow with reference to FIGS. 5A-7.

[0134] Reference is now made to FIGS. 5A and 5B which are schematic diagrams, which when taken together illustrate a Genomic Records concept of the present invention, addressing the genomic differentiation enigma. FIGS. 5A and 5B correspond to FIGS. 2A and 2B of the chef analogy described hereinabove.

[0135] An important aspect of the present invention is the Genomic Records concept. According to a preferred embodiment of the present invention the DNA (the thick recipe book 8 in the illustration) comprises a very large number of Genomic Records (analogous to pages, such as 10, 16 and 25, in the recipe book) containing the instructions for differentiation of a different cell-type, or developmental process. Each Genomic Record comprises by a very short genomic sequence which functions as a “Genomic Address” of that Genomic Record (analogous to a page number, such as the numbers 127, 134 and 157 appearing in FIG. 3, in the recipe book). At its inception, in addition to the DNA, each cell also receives a short RNA segment (the scribbled short note, such as 9, 15, 24 of FIG. 3 in the illustration). This short RNA segment binds complementarily to a “Genomic Address” sequence of one of the Genomic Records, thereby modulating expression of that Genomic Record, and accordingly determining the cell's-fate (analogous to opening the recipe book 8 to a page corresponding to a number on the scribbled note, thereby determining the meal to be prepared). A Genomic Record may also comprise multiple short RNA segments each of which binds complementarily to a target protein coding gene, thus modulating expression of this target gene (analogous to the shorthand format whereby a page, such as 10, points to other pages, such as 31-33, encoding various ingredient, such as 34, 35 and 36, all of FIG. 4).

[0136] Reference is now made to FIG. 5A. FIG. 5A illustrates a cell 37, having a genome 38. The genome 38 comprises a plurality of Genomic Records, some of which Genomic Records correlate to specific cell-types. As an example, 6 such genomic records are shown, corresponding to 6 cell-types: LYMPH genomic record 39, FIBROBLAST genomic record 40, MUSCLE genomic record 41, BONE genomic record 42, CARTILAGE genomic record 43 and NERVE genomic record 44. Each genomic record comprises genomic instructions on differentiation into a specific cell-type, as further elaborated hereinbelow with reference to FIG. 7. At cell inception, the cell 37 receives a maternal short RNA segment 46, which activates one of the genomic records, causing the cell to differentiate according to the instructions this genomic record comprises. As an example FIG. 5A illustrates reception of a maternal short RNA segment designated 46 having a nucleotide sequence herein symbolically represented by A′.

[0137] The FIBROBLAST genomic record 40 contains a binding site having a nucleotide sequence symbolically represented by A, which is complementary to the nucleotide sequence of A′, and therefore the short RNA segment 46 binds to the FIBROBLAST genomic record 40. This binding activates the FIBROBLAST genomic record, causing the cell 37 to differentiate into a fibroblast cell-type 3 (FIG. 1). Other genomic records, designated by reference numerals 39 and 41-44, comprise binding sites having nucleotide sequences that are symbolically represented by F, E, B, C and D, which are not complementary of the nucleotide sequence of the short RNA segment 46, and are therefore not activated thereby. Genomic Records, such as the FIBROBLAST genomic record 40 contain additional information, designated by reference numeral 45, which is further elaborated hereinbelow with reference to FIGS. 6 and 7.

[0138] Reference is now made to FIG. 5B, which is a simplified schematic diagram, illustrating cellular differentiation mediated by the “Genomic Records” concept. FIG. 5B depicts 2 cells in an organism, CELL A designated by reference numeral 47 and CELL B designated by reference numeral 48, each having a genome 38. It is appreciated that since CELL A 47 and CELL B 48 are cells in the same organism, the genome 38 of cells 47 and 48 is identical. Despite having an identical genome 38, CELL A 47 differentiates differently from CELL B 48, due to activation of different genomic records in these two cells. In CELL A 47 the FIBRO GENOMIC RECORD 40 is activated, causing CELL A 47 to differentiate into a FIBROBLAST CELL 3, whereas in CELL B 48 the BONE GENOMIC RECORD 42 is activated, causing the CELL B 48 to differentiate into a BONE CELL 4 (FIG. 1). The cause for activation of different genomic records in these two cells is the different maternal short RNA which they both received: CELL A 47 received a maternal short RNA segment designated 46 bearing a nucleotide sequence represented by A′ activating genomic record FIBRO 40, whereas CELL B 48 received a maternal short RNA segment designated 49 bearing a nucleotide sequence represented by B′ activating genomic record BONE 42.

[0139] Reference is now made to FIG. 6 which is a schematic diagram illustrating a “genomically programmed cell differentiation” concept of the conceptual model of the present invention, addressing the genomic differentiation enigma.

[0140] A cell designated CELL A 50 divides into 2 cells designated CELL B 51 and CELL C 52. CELL A 50, CELL B 51 and CELL C 52 each comprise a GENOME 38, which GENOME 38 comprises a plurality of GENOMIC RECORDS, herein exemplified by reference numerals 40, 42 and 43. It is appreciated that since CELL A 50, CELL B 51 and CELL C 52 are cells in the same organism, the GENOME 38 of these cells, and the GENOMIC RECORDS, exemplified by 40, 42 and 43, the genome of these cells comprises, are identical in these cells.

[0141] As described above with reference to FIG. 5B, at its inception, CELL A 50 receives a maternal short RNA segment, designated by reference numeral 46, having a nucleotide sequence represented by A′ and outlined by a broken line, which activates the FIBRO genomic record 40, thereby causing CELL A 50 to differentiate into a FIBROBLAST CELL 3. However, FIG. 6 elaborates some of the additional information 45 (FIG. 5A) of the genomic records: Genomic record may also comprise two short genomic sequences, referred to here as Daughter Cell Genomic Addresses. Blocks designated B and C are Daughter Cell Genomic Addresses of the FIBRO Genomic Record. At cell division, each parent cell transcribes two short RNA segments, corresponding to the two Daughter Cell Genomic Addresses of the Genomic Record of that parent cell, and transfers one to each of its two daughter cells. CELL A 50 transcribes and transfers to its two daughter cells 51 and 52, two short RNA segments, designated by reference numerals 49 and 53, outlined by a broken line and designated B′ and C′, corresponding to daughter cell genomic addresses designated B and C comprised in the FIBRO genomic record 40.

[0142] CELL B 51 therefore receives the above mentioned maternal short RNA segment designated 49 having a nucleotide sequence represented by B′, which binds complementarily to genomic address designated B of the BONE genomic record 42, thereby activating this genomic record, which in turn causes CELL B 51 to differentiate into a BONE CELL 4. Similarly, CELL C 52 receives the above mentioned maternal short RNA segment designated 53 having a nucleotide sequence represented by C′, which binds complementarily to genomic address designated C of a CARTILAGE genomic record 43, thereby activating this genomic record, which in turn causes CELL C 52 to differentiate into a CARTILAGE CELL 1 (FIG. 1).

[0143] It is appreciated that the mechanism illustrated by FIG. 6 enables an unlimited lineage of cells to divide into daughter cells containing the same DNA 5 (FIG. 1), and to determine the cell-fate of these daughter cells. For example, when CELL B 51 and CELL C 52 divide into their respective daughter cells (not shown), they will transfer short RNA segments designated by reference numerals 54-57, to their respective daughter cells. The cell fate of each of these daughter cells is effected by the identity of the maternal short RNA segments 54-57 they each receive, which in turn determine the genomic record activated.

[0144] Reference is now made to FIG. 7 which is a schematic diagram illustrating a “genomically programmed cell-specific protein expression modulation” concept of the conceptual model of the present invention, addressing the genomic differentiation enigma.

[0145] Cell A 58 receives a maternal short RNA segment designated 46 having a nucleotide sequence represented by A′ which activates the FIBROBLAST genomic record 40, by complementarily binding to a binding site this genomic record comprises, the nucleotide sequence of which binding site is designated A. This is similar to the process shown in FIG. 5A. However, FIG. 7 further elaborates some of the additional information 45 (FIG. 1). The FIBROBLAST genomic record 40 comprises 3 short nucleotide segments, having nucleotide sequences symbolically represented by 1, 2 and 4 respectively, which encode 3 respective short RNA oligonucleotides, designated by reference numerals 59-61. Each of these short RNA oligonucleotides modulates expression of a respective one of the target genes GENE 1, GENE 2 and GENE 4, designated by reference numerals 62-64 respectively, by complementarily binding to a binding site sequence associated with that target gene. In a preferred embodiment of the present invention, the modulation of expression of target genes such as 62-64 comprises translation inhibition of target genes by complementarily binding to binding sites located in untranslated regions of the target genes. Modulation of expression of these genes results in CELL A 58 differentiating into a FIBROBLAST cell-type 3 (FIG. 1).

[0146] It is appreciated that the concept of genomic records each comprising a cluster of short RNA segments, which segments modulate expression of target genes thereby modulating differentiation, is compatible with the clusters of miRNA oligonucleotides of the present invention, and their translational inhibition of respective target genes by means of complementarily binding to binding sites located in the untranslated regions of mRNA of these target genes.

[0147] Reference is now made to FIG. 8, which is a simplified diagram describing how a plurality of novel bioinformatically detectable oligonucleotides of the present invention, referred to here as Genomic Address Messenger (GAM) oligonucleotides, modulate expression of respective target genes.

[0148] GAM oligonucleotides are novel, bioinformatically detectable, regulatory, non protein coding, micro RNA (miRNA)-like oligonucleotides. The method by which GAMs are detected is described hereinbelow with additional reference to FIGS. 9-15.

[0149] GAM PRECURSOR DNA is encoded by the human genome. GAM TARGET GENE is a human gene encoded by the human genome.

[0150] GAM PRECURSOR DNA encodes a GAM PRECURSOR RNA. Similar to miRNA oligonucleotides, GAM PRECURSOR RNA does not encode a protein. GAM PRECURSOR RNA folds onto itself, forming GAM FOLDED PRECURSOR RNA, which has a two-dimensional ‘hairpin structure’. As is well known in the art, this ‘hairpin structure’, is typical of by miRNA precursor oligonucleotides, and is due to the fact that the nucleotide sequence of the first half of the miRNA precursor oligonucleotide is a fully or partially complementary sequence of the nucleotide sequence of the second half thereof. By complementary is meant a sequence which is reversed and wherein each nucleotide is replaced by a complementary nucleotide, as is well known in the art (e.g. ATGGC is the complementary sequence of GCCAT).

[0151] An enzyme complex comprising an enzyme called Dicer together with other necessary proteins, herein designated as the DICER COMPLEX, ‘dices’ the GAM FOLDED PRECURSOR RNA yielding a GAM RNA, in the form of a single stranded ˜22 nt long RNA segment. The DICER COMPLEX is known in the art to dice a hairpin structured miRNA precursor, thereby yielding diced miRNA in the form of a short ˜22 nt RNA segment.

[0152] GAM TARGET GENE encodes a corresponding messenger RNA, designated GAM TARGET RNA. GAM TARGET RNA comprises three regions, as is typical of mRNA of a protein coding gene: a 5′ untranslated region, a protein coding region and a 3′ untranslated region, designated 5′UTR, PROTEIN CODING and 3′UTR respectively.

[0153] GAM RNA binds complementarily (i.e. hybridizes) to one or more target binding sites located in untranslated regions of GAM TARGET RNA. This complementary binding is due to the fact that the nucleotide sequence of GAM RNA is a partial or fully complementary sequence of the nucleotide sequence of each of the target binding sites. As an illustration, FIG. 8 shows three such target binding sites, designated BINDING SITE I, BINDING SITE II and BINDING SITE III respectively. It is appreciated that the number of target binding sites shown in FIG. 8 is only illustrative and that any suitable number of target binding sites may be present. It is further appreciated that although FIG. 8 shows target binding sites only in the 3′UTR region, these target binding sites may be located instead in the 5′UTR region or in both 3′UTR and 5′UTR regions.

[0154] The complementary binding of GAM RNA to target binding sites on GAM TARGET RNA, such as BINDING SITE I, BINDING SITE II and BINDING SITE III, inhibits translation of GAM TARGET RNA into GAM TARGET PROTEIN, which is shown surrounded by a broken line.

[0155] It is appreciated that GAM TARGET GENE in fact represents a plurality of GAM target genes. The mRNA of each one of this plurality of GAM target genes comprises one or more target binding sites, each having a nucleotide sequence which is at least partly complementary to GAM RNA, and which when bound by GAM RNA causes inhibition of translation of the GAM target mRNA into a corresponding GAM target protein.

[0156] The mechanism of the translational inhibition exerted by GAM RNA on one or more GAM TARGET GENE, may be similar or identical to the known mechanism of translational inhibition exerted by known miRNA oligonucleotides.

[0157] Nucleotide sequences of each of a plurality of GAM oligonucleotides described by FIG. 8 and their respective genomic sources and chromosomal locations are set forth in Tables 1-3, hereby incorporated herein.

[0158] Nucleotide sequences of GAM PRECURSOR RNAs, and a schematic representation of a predicted secondary folding of GAM FOLDED PRECURSOR RNAs, of each of a plurality of GAM oligonucleotides described by FIG. 8 are set forth in Table 4, hereby incorporated herein.

[0159] Nucleotide sequences of a ‘diced’ GAM RNA of each of a plurality of GAM oligonucleotides described by FIG. 8 are set forth in Table 5, hereby incorporated herein.

[0160] Nucleotide sequences of target binding sites, such as BINDING SITE I, BINDING SITE II and BINDING SITE III found on GAM TARGET RNA, of each of a plurality of GAM oligonucleotides described by FIG. 8, and a schematic representation of the complementarity of each of these target binding sites to each of a plurality of GAM RNAs described by FIG. 8 are set forth in Tables 6 and 7, hereby incorporated herein.

[0161] It is appreciated that specific functions and accordingly utilities of each of a plurality of GAM oligonucleotides described by FIG. 8 correlate with, and may be deduced from, the identity of the GAM TARGET GENEs inhibited thereby, whose functions are set forth in Table 8, hereby incorporated herein.

[0162] Studies documenting well known correlations between each of a plurality of GAM TARGET GENEs of the GAM oligonucleotides of FIG. 8, and known functions and diseases are listed in Table 9, hereby incorporated herein.

[0163] The present invention discloses a novel group of oligonucleotides, belonging to the miRNA-like oligonucleotides group, here termed GAM oligonucleotides, for which a specific complementary binding has been determined bioinformatically.

[0164] Reference is now made to FIG. 9 which is a simplified block diagram illustrating a bioinformatic oligonucleotide detection system and method constructed and operative in accordance with a preferred embodiment of the present invention.

[0165] An important feature of the present invention is a BIOINFORMATIC OLIGONUCLEOTIDE DETECTION ENGINE 100, which is capable of bioinformatically detecting oligonucleotides of the present invention.

[0166] The functionality of the BIOINFORMATIC OLIGONUCLEOTIDE DETECTION ENGINE 100 includes receiving EXPRESSED RNA DATA 102, SEQUENCED DNA DATA 104, and PROTEIN FUNCTION DATA 106; performing a complex process of analysis of this data as elaborated hereinbelow, and based on this analysis provides information, designated by reference numeral 108, identifying and describing features of novel oligonucleotides.

[0167] EXPRESSED RNA DATA 102 comprises published expressed sequence tags (EST) data, published mRNA data, as well as other published RNA data. SEQUENCED DNA DATA 104 comprises alphanumeric data representing genomic sequences and preferably including annotations such as information indicating the location of known protein coding regions relative to the genomic sequences.

[0168] PROTEIN FUNCTION DATA 106 comprises information from scientific publications e.g. physiological functions of known proteins and their connection, involvement and possible utility in treatment and diagnosis of various diseases.

[0169] EXPRESSED RNA DATA 102 and SEQUENCED DNA DATA 104 may preferably be obtained from data published by the National Center for Biotechnology Informatiion (NCBI) at the National Institute of Health (NIH) (Oenuth J. P. (2000). Methods Mol. Biol. 132:301-312(2000), herein incorporated by reference).

[0170] , as well as from various other published data sources. PROTEIN FUNCTION DATA 106 may preferably be obtained from any one of numerous relevant published data sources, such as the Online Mendelian Inherited Disease In Man (OMIM(™), Hamosh et al., Nucleic Acids Res. 30: 52-55(2002)) database developed by John Hopkins University, and also published by NCBI (2000).

[0171] Prior to or during actual detection of BIOINFORMATICALLY DETECTED GROUP OF NOVEL OLIGONUCLEOTIDES 108 by the BIOINFORMATIC OLIGONUCLEOTIDE DETECTION ENGINE 100, BIOINFORMATIC OLIGONUCLEOTIDE DETECTION ENGINE TRAINING & VALIDATION FUNCTIONALITY 110 is operative. This functionality uses one or more known miRNA oligonucleotides as a training set to train the BIOINFORMATIC OLIGONUCLEOTIDE DETECTION ENGINE 100 to bioinformatically recognize miRNA-like oligonucleotides, and their respective potential target binding sites. BIOINFORMATIC OLIGONUCLEOTIDE DETECTION ENGINE TRAINING & VALIDATION FUNCTIONALITY 110 is further described hereinbelow with reference to FIG. 10.

[0172] The BIOINFORMATIC OLIGONUCLEOTIDE DETECTION ENGINE 100 preferably comprises several modules which are preferably activated sequentially, and are described as follows:

[0173] A NON-CODING GENOMIC SEQUENCE DETECTOR 112 operative to bioinformatically detect non-protein coding genomic sequences. The NON-CODING GENOMIC SEQUENCE DETECTOR 112 is further described herein below with reference to FIGS. 11A and 11B.

[0174] A HAIRPIN DETECTOR 114 operative to bioinformatically detect genomic ‘hairpin-shaped’ sequences, similar to GAM FOLDED PRECURSOR RNA (FIG. 8). The HAIRPIN DETECTOR 114 is further described herein below with reference to FIGS. 12A and 12B.

[0175] A DICER-CUT LOCATION DETECTOR 116 operative to bioinformatically detect the location on a GAM FOLDED PRECURSOR RNA which is enzymatically cut by DICER COMPLEX (FIG. 8), yielding diced GAM RNA. The DICER-CUT LOCATION DETECTOR 116 is further described herein below with reference to FIGS. 13A-13C.

[0176] A TARGET GENE BINDING-SITE DETECTOR 118 operative to bioinformatically detect target genes having binding sites, the nucleotide sequence of which is partially complementary to that of a given genomic sequence, such as a nucleotide sequence cut by DICER COMPLEX. The TARGET GENE BINDING-SITE DETECTOR 118 is further described hereinbelow with reference to FIGS. 14A and 14B.

[0177] A FUNCTION & UTILITY ANALYZER 120 operative to analyze function and utility of target genes, in order to identify target genes which have a significant clinical function and utility. The FUNCTION & UTILITY ANALYZER 120 is further described hereinbelow with reference to FIG. 15.

[0178] According to a preferred embodiment of the present invention the engine 100 may employ a cluster of 40 PCs (XEON (R), 2.8 GHz, with 80 GB storage each), connected by Ethernet to 8 servers (2-CPU, XEON (TM) 1.2-2.2 GHz, with ˜200 GB storage each), combined with an 8-processor server (8-CPU, Xeon 550 Mhz w/8 GB RAM) connected via 2 HBA fiber-channels to an EMC CLARIION (™) 100-disks, 3.6 terabyte storage device. A preferred embodiment of the present invention may also preferably comprise software which utilizes a commercial database software program, such as MICROSOFT (™) SQL Server 2000. It is appreciated that the above mentioned hardware configuration is not meant to be limiting, and is given as an illustration only. The present invention may be implemented in a wide variety of hardware and software configurations.

[0179] The present invention discloses 1708 novel oligonucleotides of the GAM group of oligonucleotides, which have been detected bioinformatically, as set forth in Tables 1-4, and 246 novel polynucleotides of the GR group of polynucleotides, which have been detected bioinformatically. Laboratory confirmation of 43 bioinformatically predicted oligonucleotides of the GAM group of oligonucleotides, and several bioinformatically predicted polynucleotides of the GR group of polynucleotides, is described hereinbelow with reference to FIGS. 21-24D.

[0180] Reference is now made to FIG. 10 which is a simplified flowchart illustrating operation of a preferred embodiment of the BIOINFORMATIC OLIGONUCLEOTIDE DETECTION ENGINE TRAINING &VALIDATION FUNCTIONALITY 110 described hereinabove with reference to FIG. 9.

[0181] BIOINFORMATIC OLIGONUCLEOTIDE DETECTION ENGINE TRAINING & VALIDATION FUNCTIONALITY 110 begins by training the BIOINFORMATIC OLIGONUCLEOTIDE DETECTION ENGINE 100 (FIG. 9) to recognize one or more known miRNA oligonucleotides, as designated by reference numeral 122. This training step comprises HAIRPIN DETECTOR TRAINING & VALIDATION FUNCTIONALITY 124, further described hereinbelow with reference to FIG. 12A, DICER-CUT LOCATION DETECTOR TRAINING & VALIDATION FUNCTIONALITY 126, further described hereinbelow with reference to FIG. 13A and 13B, and TARGET GENE BINDING-SITE DETECTOR TRAINING & VALIDATION FUNCTIONALITY 128, further described hereinbelow with reference to FIG. 14A.

[0182] Next, the BIOINFORMATIC OLIGONUCLEOTIDE DETECTION ENGINE TRAINING & VALIDATION FUNCITONALITY 110 is operative bioinformatically detect novel oligonucleotides, using BIOINFORMATIC OLIGONUCLEOTIDE DETECTION ENGINE 100 (FIG. 9), as designated by reference numeral 130. Wet lab experiments are preferably conducted in order to validate expression and preferably function of some samples of the novel oligonucleotides detected by the BIOINFORMATIC OLIGONUCLEOTIDE DETECTION ENGINE 100, as designated by reference numeral 132. FIGS. 22A-24D illustrate examples of wet-lab validation of the above mentioned sample novel oligonucleotides bioinformatically detected in accordance with a preferred embodiment of the present invention.

[0183] Reference is now made to FIG. 11A which is a simplified block diagram of a preferred implementation of the NONCODING GENOMIC SEQUENCE DETECTOR 112 described hereinabove with reference to FIG. 9. The NON-PROTEIN CODING GENOMIC SEQUENCE DETECTOR 112 preferably receives at least two types of published genomic data: EXPRESSED RNA DATA 102 and SEQUENCED DNA DATA 104. The EXPRESSED RNA DATA 102 may include, inter alia, EST data, EST clusters data, EST genome alignment data and mRNA data. Sources for EXPRESSED RNA DATA 102 include NCBI dbEST, NCBI UniGene clusters and mapping data, and TIGR (Kirkness F. and Kerlavage, A. R., Methods Mol. Biol. 69:261-268 (1997))

[0184] gene indices. SEQUENCED DNA DATA 104 may include sequence data (FASTA format files), and feature annotations (GenBank file format) mainly from NCBI databases. Based on the above mentioned input data, the NON-PROTEIN CODING GENOMIC SEQUENCE DETECTOR 112 produces a plurality of NON-PROTEIN CODING GENOMIC SEQUENCES 136. Preferred operation of the NON-PROTEIN CODING GENOMIC SEQUENCE DETECTOR 112 is described hereinbelow with reference to FIG. 11B

[0185] Reference is now made to FIG. 11B which is a simplified flowchart illustrating a preferred operation of the NONCODING GENOMIC SEQUENCE DETECTOR 112 of FIG. 9. Detection of NON-PROTEIN CODING GENOMIC SEQUENCES 136, generally preferably progresses along one of the following two paths:

[0186] A first path for detecting NON-PROTEIN CODING GENOMIC SEQUENCES 136 (FIG. 11A) begins with receipt of a plurality of known RNA sequences, such as EST data. Each RNA sequence is first compared with known protein-coding DNA sequences, in order to select only those RNA sequences which are non-protein coding, i.e. intergenic or intronic sequences. This can preferably be performed by using one of many alignment algorithms known in the art, such as BLAST (Altschul et al., J. Mol. Biol. 215:403-410 (1990)). This sequence comparison preferably also provides localization of the RNA sequence on the DNA sequences.

[0187] Alternatively, selection of non-protein coding RNA sequences and their localization on the DNA sequences can be performed by using publicly available EST cluster data and genomic mapping databases, such as the UNIGENE database published by NCBI or the TIGR database. Such databases, map expressed RNA sequences to DNA sequences encoding them, find the correct orientation of EST sequences, and indicate mapping of ESTs to protein coding DNA regions, as is well known in the art. Public databases, such as TIGR, may also be used to map an EST to a cluster of ESTs, known in the art as Tentative Human Consensus and assumed to be expressed as one segment. Publicly available genome annotation databases, such as NCBIs GenBank, may also be used to deduce expressed intronic sequences.

[0188] Optionally, an attempt may be made to “expand” the non-protein RNA sequences thus found, by searching for transcription start and end signals, respectively upstream and downstream of the location of the RNA on the DNA, as is well known in the art.

[0189] A second path for detecting NON-PROTEIN CODING GENOMIC SEQUENCES 136 (FIG. 11A) begins with receipt of DNA sequences. The DNA sequences are parsed into non protein coding sequences, using published DNA annotation data, by extracting those DNA sequences which are between known protein coding sequences. Next, transcription start and end signals are sought. If such signals are found, and depending on their robustness, probable expressed non-protein coding genomic sequences are obtained. Such approach is especially useful for identifying novel GAM oligonucleotides which are found in proximity to other known miRNA oligonucleotides, or other wet-lab validated GAM oligonucleotides. Since, as described hereinbelow with reference to FIG. 16, GAM oligonucleotides are frequently found in clusters, sequences located near known miRNA oligonucleotides are more likely to contain novel GAM oligonucleotides. Optionally, sequence orthology, i.e. sequence conservation in an evolutionary related species, may be used to select genomic sequences having a relatively high probability of containing expressed novel GAM oligonucleotides.

[0190] Reference is now made to FIG. 12A which is a simplified block diagram of a preferred implementation of the HAIRPIN DETECTOR 114 described hereinabove with reference to FIG. 9.

[0191] The goal of the HAIRPIN DETECTOR 114 is to detect hairpin-shaped genomic sequences, similar to those of known miRNA oligonucleotides. A hairpin-shaped genomic sequence is a genomic sequence, having a first half which is at least partially complementary to a second half thereof, which causes the halves to folds onto themselves, thereby forming a hairpin structure, as mentioned hereinabove with reference to FIG. 8.

[0192] The HAIRPIN DETECTOR 114 (FIG. 9) receives a plurality of NON-PROTEIN CODING GENOMIC SEQUENCES 136 (FIG. 11A). Following operation of HAIRPIN DETECTOR TRAINING & VALIDATION FUNCTIONALITY 124 ( FIG. 10), the HAIRPIN DETECTOR 114 is operative to detect and output hairpin-shaped sequences, which are found in the NON-PROTEIN CODING GENOMIC SEQUENCES 136. The hairpin-shaped sequences detected by the HAIRPIN DETECTOR 114 are designated HAIRPINS STRUCTURES ON GENOMIC SEQUENCES 138. A preferred mode of operation of the HAIRPIN DETECTOR 114 is described hereinbelow with reference to FIG. 12B.

[0193] HAIRPIN DETECTOR TRAINING & VALIDATION FUNCTIONALITY 124 includes an iterative process of applying the HAIRPIN DETECTOR 114 to known hairpin shaped miRNA precursor sequences, calibrating the HAIRPIN DETECTOR 114 such that it identifies a training set of known hairpin-shaped miRNA precursor sequences, as well as other similarly hairpin-shaped sequences. In a preferred embodiment of the present invention, the HAIRPIN DETECTOR TRAINING & VALIDATION FUNCTIONALITY 124 trains the HAIRPIN DETECTOR 114 and validates each of the steps of operation thereof described hereinbelow with reference to FIG. 12B.

[0194] The HAIRPIN DETECTOR TRAINING & VALIDATION FUNCTIONALITY 124 preferably uses two sets of data: the aforesaid training set of known hairpin-shaped miRNA precursor sequences, such as hairpin-shaped miRNA precursor sequences of 440 miRNA oligonucleotides of H. sapiens, M. musculus, C. elegans, C. Brigssae and D. Melanogaster, annotated in the RFAM database (Griffiths-Jones, 2003), and a large background set of about 350,000 hairpin-shaped sequences found in expressed non-protein coding genomic sequences. The background set is expected to comprise some valid, previously undetected hairpin-shaped miRNA-like precursor sequences, and many hairpin-shaped sequences which are not hairpin-shaped miRNA-like precursors.

[0195] In order to validate the performance of the HAIRPIN DETECTOR 114 (FIG. 9), preferably a variation of the k-fold cross validation method (Tom M. Mitchell, Machine Learning, McGraw Hill (1997)), is employed. This preferred validation method is well adapted to deal with the training set, which includes large numbers of similar or identical miRNAs. The training set is therefore preferably initially divided into groups of miRNAs such that any two miRNAs that belong to different groups have an Edit Distance score of at least D=3, i.e. they differ by at least 3 editing steps (Dan Gusfield, Algorithms on strings, trees, and sequences: computer science and computational biology, Cambridge University Press, 1997). Next, the groups are preferably classified into k sets of groups. Standard k-fold cross validation is preferably performed on these sets, preferably using k=5, such that the training set and the test set include at least one sequence from each of the groups. It is appreciated that without the prior grouping, standard cross validation methods incorrectly indicate much higher performance results for the predictors due to the redundancy of training examples within the genome of a species and across genomes of different species.

[0196] In a preferred embodiment of the present invention, using the abovementioned validation methodology, the efficacy of the HAIRPIN DETECTOR 114 (FIG. 9) is confirmed. For example, when a similarity threshold is chosen such that 90% of the known hairpin-shaped miRNA precursors are successfully predicted, only 11% of the approximately 342,880 background set of hairpin-shaped sequences are predicted to be hairpin-shaped miRNA-like precursors.

[0197] Reference is now made to FIG. 12B which is a simplified flowchart illustrating preferred operation of the HAIRPIN DETECTOR 114 of FIG. 9. The HAIRPIN DETECTOR 114 preferably initially uses a secondary structure folding algorithm based on free-energy minimization, such as the MFOLD algorithm, described in Mathews et al. J. Mol. Biol. 288:911-940 (1999) and Zuker, M. Nucleic Acids Res. 31: 3406-3415. (2003), the disclosure of which is hereby incorporated by reference. This algorithm is operative to calculate probable secondary structure folding patterns of the NON-PROTEIN CODING GENOMIC SEQUENCES 136 (FIG. 11A) as well as the free-energy of each of these probable secondary folding patterns. The secondary structure folding algorithm, such as the MFOLD algorithm (Mathews, 1997; Zuker 2003), typically provides a listing of the base-pairing of the folded shape, i.e. a listing of each pair of connected nucleotides in the sequence.

[0198] Next, the HAIRPIN DETECTOR 114 analyzes the results of the secondary structure folding patterns, in order to determine the presence and location of hairpin folding structures. The goal of this second step is to assess the base-pairing listing provided by the secondary structure folding algorithm, in order to determine whether the base-pairing listing describes one or more hairpin type bonding pattern. Preferably, sequence segment corresponding to a hairpin structure is then separately analyzed by the secondary structure folding algorithm in order to determine its exact folding pattern and free-energy.

[0199] The HAIRPIN DETECTOR 114 then assesses the hairpin structures found by the previous step, comparing them to hairpin structures of known miRNA precursors, using various characteristic hairpin structure features such as length of the hairpin structure, length of the loop of mismatched nucleotides at its center, its free-energy and its thermodynamic stability, the amount and type of mismatched nucleotides and the existence of sequence repeat-elements. Only hairpins that bear statistically significant resemblance to the training set of hairpin structures of known miRNA precursors, according to the abovementioned parameters, are accepted.

[0200] In a preferred embodiment of the present invention, similarity to the training set of hairpin structures of known miRNA precursors is determined using a “similarity score” which is calculated using a weighted sum of terms, where each term is a function of one of the abovementioned hairpin structure features. The parameters of each function are learned from the set of hairpin structures of known miRNA precursors, as described hereinabove with reference to HAIRPIN DETECTOR TRAINING & VALIDATION FUNCTIONALITY 124 (FIG. 10). The weight of each term in the similarity score is optimized so as to achieve maximized separation between the distribution peaks of similarity scores validated miRNA-precursor hairpin structures, and the distribution of similarity scores of hairpin structures detected in the background set mentioned hereinabove with reference to FIG. 12B.

[0201] In an alternative preferred embodiment of the present invention, the step described in the preceding paragraph may be split into two stages. A first stage implements a simplified scoring method, typically based on thresholding a subset of the hairpin structure features described hereinabove, and may employ a minimum threshold for hairpin structure length and a maximum threshold for free energy. A second stage is preferably more stringent, and preferably employs a full calculation of the weighted sum of terms described hereinabove. The second stage preferably is performed only on the subset of hairpin structures that survived the first stage.

[0202] The HAIRPIN DETECTOR 114 also attempts to select hairpin structures whose thermodynamic stability is similar to that of hairpin structures of known miRNA precursors. This may be achieved in various ways. A preferred embodiment of the present invention utilizes the following methodology, preferably comprising three logical steps:

[0203] First, the HAIRPIN DETECTOR 114 attempts to group hairpin structures into “families” of closely related hairpin structures. As is known in the art, a secondary structure folding algorithm typically provides multiple alternative folding patterns, for a given genomic sequence and indicates the free energy of each alternative folding pattern. It is a particular feature of the present invention that the HAIRPIN DETECTOR 114 preferably assesses the various hairpin structures appearing in the various alternative folding patterns and groups hairpin structures which appear at identical or similar sequence locations in various alternative folding patterns into common sequence location based “families” of hairpins. For example, all hairpin structures whose center is within 7 nucleotides of each other may be grouped into a family”. Hairpin structures may also be grouped into a family” if their nucleotide sequences are identical or overlap to a predetermined degree.

[0204] It is also a particular feature of the present invention that the hairpin structure “families” are assessed in order to select only those families which represent hairpin structures that are as thermodynamically stable as those of hairpin structures of known miRNA precursors. Preferably only families which are represented in at least a selected majority of the alternative secondary structure folding patterns, typically 65%, 80% or 100% are considered to be sufficiently stable.

[0205] It is an additional particular feature of the present invention that the most suitable hairpin structure is selected from each selected family. For example, a hairpin structure which has the greatest similarity to the hairpin structures appearing in alternative folding patterns of the family may be preferred. Alternatively or additionally, the hairpin structures having relatively low free energy may be preferred.

[0206] Alternatively or additionally considerations of homology to hairpin structures of other organisms and the existence of clusters of thermodynamically stable hairpin structures located adjacent to each other along a sequence may be important in selection of hairpin structures. The tightness of the clusters in terms of their location and the occurrence of both homology and clusters may be of significance.

[0207] Reference is now made to FIGS. 13A-13C which together describe the structure and operation of the DICER-CUT LOCATION DETECTOR 116, described hereinabove with FIG. 9.

[0208] FIG. 13A is a simplified block diagram of a preferred implementation 116. The goal of the DICER-CUT LOCATION DETECTOR 116 is to detect the location in which the DICER COMPLEX, described hereinabove with reference to FIG. 8, dices GAM FOLDED PRECURSOR RNA, yielding GAM RNA.

[0209] The DICER-CUT LOCATION DETECTOR 116 therefore receives a plurality of HAIRPIN STRUCTURES ON GENOMIC SEQUENCES 138 (FIG. 12A), and, following operation of DICER-CUT LOCATION DETECTOR TRAINING & VALIDATION FUNCTIONALITY 126 (FIG. 10), is operative to detect a plurality of DICER-CUT SEQUENCES FROM HAIRPIN STRUCTURES 140.

[0210] Reference is now made to FIG. 13B which is a simplified flowchart illustrating a preferred implementation of DICER-CUT LOCATION DETECTOR TRAINING & VALIDATION FUNCTIONALITY 126.

[0211] A general goal of the DICER-CUT LOCATION DETECTOR TRAINING & VALIDATION FUNCTIONALITY 126 is to analyze the dicer-cut locations of known diced miRNA on respective hairpin shaped miRNA precursors in order to determine a common pattern in these locations, which can be used to predict dicer cut locations on GAM folded precursor RNAs.

[0212] The dicer-cut locations of known miRNA precursors are obtained and studied. Locations of the 5′ and/or 3′ ends of the known diced miRNAs are preferably represented by their respective distances from the 5′ end of the corresponding hairpin shaped miRNA precursor. Additionally or alternatively, the 5′ and/or 3′ ends of the known diced miRNAs are preferably represented by the relationship between their locations and the locations of one or more nucleotides along the hairpin shaped miRNA precursor. Additionally or alternatively, the 5′ and/or 3′ ends of the known diced miRNAs are preferably represented by the relationship between their locations and the locations of one or more bound nucleotide pairs along the hairpin shaped miRNA precursor. Additionally or alternatively, the 5′ and/or 3′ ends of the known diced miRNAs are preferably represented by the relationship between their locations and the locations of one or more mismatched nucleotide pairs along the hairpin shaped miRNA precursor. Additionally or alternatively, the 5′ and/or 3′ ends of the known diced miRNAs are preferably represented by the relationship between their locations and the locations of one or more unmatched nucleotides along the hairpin shaped miRNA precursor. Additionally or alternatively, locations of the 5′ and/or 3′ ends of the known diced miRNAs are preferably represented by their respective distances from the loop located at the center of the corresponding hairpin shaped miRNA precursor.

[0213] One or more of the foregoing location metrics may be employed in the training and validation functionality. Additionally, metrics related to the nucleotide content of the diced miRNA and/or of the hairpin shaped miRNA precursor may be employed.

[0214] In a preferred embodiment of the present invention, DICER-CUT LOCATION DETECTOR TRAINING & VALIDATION FUNCTIONALITY 126 preferably employs standard machine learning techniques known in the art of machine learning for analysis of existing patterns in a given “training set” of examples. These techniques are capable, to a certain degree, of detecting similar patterns in other, previously unseen examples. Such machine learning techniques include, but are not limited to neural networks, Bayesian networks, Support Vector Machines (SVM), Genetic Algorithms, Markovian modeling, Maximum Likelihood modeling, Nearest Neighbor algorithms, Decision trees and other techniques, as is well known in the art.

[0215] In accordance with one embodiment of the present invention, machine learning predictors, such as a Support Vector Machine (SVM) predictor, are applied to the aforementioned training set and are operative, for example to test every possible nucleotide on a hairpin as a candidate for being the 5′ end or the 3′ end of a diced GAM RNA. More preferred machine learning predictors include predictors based on Nearest Neighbor, Bayesian modeling, and K-nearest-neighbor algorithms. A training set of the known miRNA precursor sequences is preferably used for training multiple separate classifiers or predictors, each of which produces a model for the 5′ and/or 3′ end locations of a diced miRNA with respect to its hairpin precursor. The models take into account one or more of the various miRNA location metrics described above.

[0216] Performance of the resulting predictors, evaluated on the abovementioned validation set of 440 published miRNAs using k-fold cross validation (Mitchell, 1997) with k=3, is found to be as follows: in 70% of known miRNAs 5′-end location is correctly determined by an SVM predictor within up to 2 nucleotides; a Nearest Neighbor (EDIT DISTANCE) predictor achieves 56% accuracy (247/440); a Two-Phased predictor that uses Bayesian modeling (TWO PHASED) achieves 80% accuracy (352/440), when only the first phase is used. When the second phase (strand choice) is implemented by a nave Bayesian model the accuracy is 55% (244/440), and when the K-nearest-neighbor modeling is used for the second phase, 374/440 decision are made and the accuracy is 65% (242/374). A K-near-nearest-neighbor predictor (FIRST-K) achieves 61% accuracy (268/440). The accuracies of all predictors are considerably higher on top scoring subsets of published miRNA.

[0217] Finally, in order to validate the efficacy and accuracy of the DICER-CUT LOCATION DETECTOR 116, a sample of novel oligonucleotides detected thereby is preferably selected, and validated by wet lab. Laboratory results validating the efficacy of the DICER-CUT LOCATION DETECTOR 116 are described hereinbelow with reference to FIGS. 21-24D.

[0218] Reference is now made to FIG. 13C which is a simplified flowchart illustrating operation of DICER-CUT LOCATION DETECTOR 116 (FIG. 9), constructed and operative in accordance with a preferred embodiment of the present invention. The DICER CUT LOCATION DETECTOR 116 preferably comprises a machine learning computer program module, which is trained to recognize dicer-cut locations on known hairpin-shaped miRNA precursors, and based on this training, is operable to detect dicer-cut locations of novel GAM RNAs (FIG. 8) on GAM FOLDED PRECURSOR RNAs (FIG. 8). In a preferred embodiment of the present invention, the dicer-cut location module preferably utilizes machine learning algorithms, such as known Support Vector Machine (SVM) and more preferably: known Bayesian modeling, Nearest Neighbors, and K-nearest-neighbor algorithms.

[0219] When initially assessing a novel GAM FOLDED PRECURSOR RNA, all 19-24 nucleotide long segments thereof are initially considered as “potential GAM RNAs”, since the dicercut location is initially unknown.

[0220] For each such potential GAM RNA, the location of its 5′ end or the locations of its 5′ and 3′ ends are scored by at least one recognition classifier or predictor.

[0221] In a preferred embodiment of the present invention, the DICER-CUT LOCATION DETECTOR 116 (FIG. 9) may use a Support Vector Machine predictor trained on and operating on features such as the following:

[0222] Locations of the 5′ and/or 3′ ends of the known diced miRNAs, which are preferably represented by their respective distances from the 5′ end of the corresponding hairpin shaped miRNA precursor. Additionally or alternatively, the 5′ and/or 3′ ends of the known diced miRNAs are preferably represented by the relationship between their locations and the locations of one or more nucleotides along the hairpin shaped miRNA precursor. Additionally or alternatively, the 5′ and/or 3′ ends of the known diced miRNAs are preferably represented by the relationship between their locations and the locations of one or more bound nucleotide pairs along the hairpin shaped miRNA precursor. Additionally or alternatively, the 5′ and/or 3′ ends of the known diced miRNAs are preferably represented by the relationship between their locations and the locations of one or more mismatched nucleotide pairs along the hairpin shaped miRNA precursor. Additionally or alternatively, the 5′ and/or 3′ ends of the known diced miRNAs are preferably represented by the relationship between their locations and the locations of one or more unmatched nucleotides along the hairpin shaped miRNA precursor. Additionally or alternatively, locations of the 5′ and/or 3′ ends of the known diced miRNAs are preferably represented by their respective distances from the loop located at the center of the corresponding hairpin shaped miRNA precursor; and secondarily

[0223] Metrics related to the nucleotide content of the diced miRNA and/or of the hairpin shaped miRNA precursor.

[0224] In another preferred embodiment of the present invention, the DICER-CUT LOCATION DETECTOR 116 (FIG. 9) preferably employs an “EDIT DISTANCE” predictor, which seeks sequences that are similar to those of known miRNAs, utilizing a Nearest Neighbor algorithm, where a similarity metric between two sequences is a variant of the Edit Distance algorithm (Dan Gusfield, Algorithms on strings, trees, and sequences: computer science and computational biology, Cambridge University Press, 1997). The EDIT DISTANCE predictor is based on an observation that miRNA oligonucleotides tend to form clusters, the members of which show marked sequence similarity.

[0225] In yet another preferred embodiment of the present invention, the DICER-CUT LOCATION DETECTOR 116 (FIG. 9) preferably uses a “TWO PHASE” predictor, which predicts the dicer-cut location in two distinct phases: (a) selecting a double-stranded segment of the GAM FOLDED PRECURSOR RNA (FIG. 8) comprising the GAM RNA by nave Bayesian modeling and (b) detecting which strand of the double-stranded segment contains GAM RNA (FIG. 8) by employing either nave or by K-nearest-neighbor modeling. K-nearest-neighbor modeling is a variant of the ‘FIRST-K’ predictor described hereinbelow, with parameters optimized for this specific task. The ‘TWO PHASE’ predictor may be operated in two modes: either utilizing only the first phase and thereby producing two alternative dicer-cut location predictions, or utilizing both phases and thereby producing only one final dicer-cut location.

[0226] In still another preferred embodiment of the present invention, the DICER-CUT LOCATION DETECTOR 116 preferably uses a “FIRST-K” predictor, which utilizes a K-nearest-neighbor algorithm. The similarity metric between any two sequences is 1- E/L, where L is a parameter, preferably 8-10 and E is the edit distance between the two sequences, taking into account only the first L nucleotides of each sequence. If the K-nearest-neighbor scores of two or more locations on the GAM FOLDED PRECURSOR RNA (FIG. 8) are not significantly different, these locations are further ranked by a Bayesian model, similar to the one described hereinabove.

[0227] The TWO PHASE and FIRST-K predictors preferably are trained on and operate on features such as the following:

[0228] Locations of the 5′ and/or 3′ ends of the the known diced miRNAs, which are preferably represented by their respective distances from the 5′ end of the corresponding hairpin shaped miRNA precursor. Additionally or alternatively, the 5′ and/or 3′ ends of the known diced miRNAs are preferably represented by the relationship between their locations and the locations of one or more nucleotides along the hairpin shaped miRNA precursor. Additionally or alternatively, the 5′ and/or 3′ ends of the known diced miRNAs are preferably represented by the relationship between their locations and the locations of one or more bound nucleotide pairs along the hairpin shaped miRNA precursor. Additionally or alternatively, the 5′ and/or 3′ ends of the known diced miRNAs are preferably represented by the relationship between their locations and the locations of one or more mismatched nucleotide pairs along the hairpin shaped miRNA precursor. Additionally or alternatively, the 5′ and/or 3′ ends of the known diced miRNAs are preferably represented by the relationship between their locations and the locations of one or more unmatched nucleotides along the hairpin shaped miRNA precursor. Additionally or alternatively, locations of the 5′ and/or 3′ ends of the the known diced miRNAs are preferably represented by their respective distances from the loop located at the center of the corresponding hairpin shaped miRNA precursor; and secondarily

[0229] Metrics related to the nucleotide content of the diced miRNA and/or of the hairpin shaped miRNA precursor.

[0230] In accordance with an embodiment of the present invention scores of two or more of the abovementioned classifiers or predictors are integrated, yielding an integrated score for each “potential GAM RNA”. As an example, FIG. 13C illustrates integration of scores from two classifiers, a 3′ end recognition classifier and a 5′ end recognition classifier, the scores of which are integrated to yield an integrated score. Most preferably, the INTEGRATED SCORE of FIG. 13C preferably implements a “best-of-breed” approach employing a pair of classifiers and accepting only “potential GAM RNAs” that score highly on one of the above mentioned “EDIT DISTANCE”, or “TWO-PHASE” predictors. In this context, “high scores” means scores which have been demonstrated to have low false positive value when scoring known miRNA oligonucleotides. Alternatively, the INTEGRATED SCORE may be derived from operation of more or less than two classifiers.

[0231] The INTEGRATED SCORE is evaluated as follows: (a) the “potential GAM RNA” having the highest score is preferably taken to be the most probable GAM RNA, and (b) if the integrated score of this most probable GAM RNA is higher than a pre-defined threshold, then the most probable GAM RNA is accepted as a PREDICTED GAM RNA. Preferably, this evaluation technique is not limited to the highest scoring potential GAM RNA.

[0232] Reference is now made to FIG. 14A which is a simplified block diagram of a preferred implementation of the TARGET GENE BINDING-SITE DETECTOR 118 described hereinabove with reference to FIG. 9. The goal of the TARGET GENE BINDING-SITE DETECTOR 118 is to detect one or more binding sites such as BINDING SITE I, BINDING SITE II and BINDING SITE III (FIG. 8) located in untranslated regions of the mRNA of a known gene, the nucleotide sequence of which binding sites is partially or fully complementary to a GAM RNA, thereby determining that the above mentioned known gene is a target gene thereof.

[0233] The TARGET GENE BINDING-SITE DETECTOR 118 (FIG. 9) receives a plurality of DICER-CUT SEQUENCES FROM HAIRPIN STRUCTURES 140 (FIG. 13A), and a plurality of POTENTIAL TARGET GENE SEQUENCES 142 which are derived from SEQUENCED DNA DATA 104 (FIG. 9).

[0234] TARGET GENE BINDING-SITE DETECTOR TRAINING & VALIDATION FUNCTIONALITY 128 (FIG. 10) is operative to train the TARGET GENE BINDING-SITE DETECTOR on known miRNAs and their respective target genes. A sequence comparison of sequences of known miRNA oligonucleotides to sequences of known binding sites of known target thereof is performed by utilizing BLAST or other algorithms such as EDIT DISTANCE.

[0235] The results are preferably employed to define a threshold based on scoring distinctions between known miRNA binding sites and sequences which are known not to be miRNA binding sites. This threshold is used during operation of TARGET GENE BINDING-SITE DETECTOR 118 to distinguish between miRNA-like binding sites of potential GAM RNA and other sequences.

[0236] Next, the binding sites are expanded, and determinations are made whether if nucleotide sequences immediately adjacent to the binding sites found by the sequence comparison algorithm (e.g. BLAST or EDIT DISTANCE), may improve the match. Free-energy and spatial structure are computed for the resulting binding sites. Binding sites which are clustered are strongly preferred and binding sites found in evolutionarily conserved sequences may also be preferred. Free energy, spatial structure and the above preferences are reflected in scoring.

[0237] The resulting scores, characteristic of known binding sites (e.g. binding sites of known miRNA oligonucleotides Lin-4 and Let-7 to target genes Lin-14, Lin-41, Lin 28 etc.), may be employed for detection of binding-sites of novel GAM RNAs.

[0238] Following operation of TARGET GENE BINDING-SITE DETECTOR TRAINING & VALIDATION FUNCTIONALITY 128 (FIG. 10), the TARGET GENE BINDING-SITE DETECTOR 118 is operative to detect a plurality of POTENTIAL NOVEL TARGET GENES HAVING BINDING-SITE/S 144 the nucleotide sequence of which is partially or fully complementary to that of each of the plurality of DICER-CUT SEQUENCES FROM HAIRPIN STRUCTURES 140. Preferred operation of the TARGET GENE BINDING-SITE DETECTOR 118 is further described hereinbelow with reference to FIG. 14B.

[0239] Reference is now made to FIG. 14B which is a simplified flowchart illustrating a preferred operation of the TARGET GENE BINDING-SITE DETECTOR 118 of FIG. 9. In a preferred embodiment of the present invention, the TARGET GENE BINDING-SITE DETECTOR 118 employs a sequence comparison algorithm such as BLAST in order to compare the nucleotide sequence of each of the plurality of DICERCUT SEQUENCES FROM HAIRPIN STRUCTURES 140 (FIG. 13A), to the POTENTIAL TARGET GENE SEQUENCES 142 (FIG. 14A), such as untranslated regions of known mRNAs, in order to find crude potential matches. Alternatively, the sequence comparison may be performed using a sequence match search tool that is essentially a variant of the EDIT DISTANCE algorithm described hereinabove with reference to FIG. 13C, and the Nearest Neighbor algorithm.

[0240] A sequence comparison of DICER-CUT SEQUENCES FROM HAIRPIN STRUCTURES 140 (FIG. 14A) are compared to POTENTIAL TARGET GENE SEQUENCES 142 (FIG. 14A) by utilizing BLAST or other algorithms such as EDIT DISTANCE.

[0241] The results are preferably filtered according to a threshold determined in accordance with the scoring resulting from the sequence comparison carried out by the TARGET GENE BINDING-SITE DETECTOR TRAINING & VALIDATION FUNCTIONALITY 128.

[0242] Next the binding sites are expanded, and determinations are made whether if nucleotide sequences immediately adjacent to the binding sites found by the sequence comparison algorithm (e.g. BLAST or EDIT DISTANCE), may improve the match.

[0243] Free-energy and spatial structure are computed for the resulting binding sites. Binding sites which are clustered are strongly preferred and binding sites found in evolutionarily conserved sequences may also be preferred. Free energy, spatial structure and the above preferences are reflected in scoring.

[0244] The resulting scores are compared with scores characterstic of known binding sites (e.g. binding sites of known miRNA oligonucleotides Lin-4 and Let-7 to target genes Lin-14, Lin-41, Lin 28 etc.).

[0245] For each candidate binding site a score, here termed Binding Site Prediction Accuracy, is calculated which estimates its similarity to known binding sites. This score is based on GAM binding site characteristics including, but not limited to:

[0246] The free energy of binding of the GAM RNA-GAM RNA binding site complex;

[0247] Additionally or alternatively, the 5′ and/or 3′ ends of the GAM RNA, preferably represented by the relationship between their locations and the locations of one or more nucleotides along the GAM RNA; Additionally or alternatively, the 5′ and/or 3′ ends of the GAM RNA, preferably represented by the relationship between their locations and the locations of one or more bound nucleotide pairs along the GAM RNA binding site complex; Additionally or alternatively, the 5′ and/or 3′ ends of the GAM RNA, preferably represented by the relationship between their locations and the locations of one or more mismatched nucleotide pairs along the GAM RNA binding-site complex; Additionally or alternatively, the 5′ and/or 3′ ends of the GAM RNA, preferably represented by the relationship between their locations and the locations of one or more unmatched nucleotides along the GAM RNA binding-site complex.

[0248] In accordance with another preferred embodiment of the present invention, binding sites are searched by a reversed process. Sequences of K (preferably 22) nucleotides of a untranslated regions of a target gene are assessed as potential binding sites. A sequence comparison algorithm, such as BLAST or EDIT DISTANCE, is then used to search elsewhere in the genome for partially or fully complementary sequences which are found in known miRNA oligonucleotides or computationally predicted GAM oligonucleotides. Only complementary sequences, which meet predetermined spatial structure and free energy criteria as described hereinabove are accepted. Clustered binding sites are strongly preferred and potential binding sites and potential GAM oligonucleotides which occur in evolutionarily conserved genomic sequences are also preferred. Scoring of candidate binding sites takes into account free energy and spatial structure of the binding site complexes, as well as the aforesaid preferences.

[0249] Target binding sites identified by the TARGET GENE BINDING-SITE DETECTOR 118 (FIG. 9), are preferably divided into four groups:
[0250] a) binding sites which are exactly complementary to the predicted GAM RNA. (1 nt. mismatch is allowed)
[0251] b) binding sites which are not exactly complementary to the predicted GAM RNA and having 0.8=<Binding Site Prediction Accuracy<1;
[0252] c) binding sites which are not exactly complementary to the predicted GAM RNA and having 0.7=<Binding Site Prediction Accuracy<0.8; and
[0253] d) binding sites which are not exactly complementary to the predicted GAM RNA and having 0.6=<Binding Site Prediction Accuracy<0.7.

[0254] The average number of mismatched nucleotides in the alignment of predicted GAM RNA and a corresponding target gene binding-site is smallest in category a and largest in category d.

[0255] In accordance with a preferred embodiment of the present invention there is provided a binding site specific ranking, indicative of the degree of similarity of characteristics of the binding of a GAM to a target gene binding site, to binding characteristic of known miRNAs. This ranking preferably utilizes the evaluation criteria described hereinabove.

[0256] In accordance with another preferred embodiment of the present invention, there is provided a UTR specific ranking of GAM to target gene binding., indicative of the degree of similarity of characteristics of the binding of a GAM to a cluster of target gene binding sites on a UTR, to binding characteristics of known miRNAs to UTRs of corresponding miRNA target genes. This ranking preferably is a weighted sum of the binding site specific rankings of various clustered binding sites.

[0257] Reference is now made to FIG. 15 which is a simplified flowchart illustrating a preferred operation of the FUNCTION & UTILITY ANALYZER 120 described hereinabove with reference to FIG. 9. The goal of the FUNCTION & UTILITY ANALYZER 120 is to determine if a potential target gene is in fact a valid clinically useful target gene. Since a potential novel GAM oligonucleotide binding a binding site in the UTR of a target gene is understood to inhibit expression of that target gene, and if that target gene is shown to have a valid clinical utility, then in such a case it follows that the potential novel oligonucleotide itself also has a valid useful function which is the opposite of that of the target gene.

[0258] The FUNCTION & UTILITY ANALYZER 120 preferably receives as input a plurality of POTENTIAL NOVEL TARGET GENES HAVING BINDING-SITE/S 144 (FIG. 14A), generated by the TARGET GENE BINDING-SITE DETECTOR 118 (FIG. 9). Each potential oligonucleotide is evaluated as follows: First, the system checks to see if the function of the potential target gene is scientifically well established. Preferably, this can be achieved bioinformatically by searching various published data sources presenting information on known function of proteins. Many such data sources exist and are published as is well known in the art. Next, for those target genes the function of which is scientifically known and is well documented, the system then checks if scientific research data exists which links them to known diseases. For example, a preferred embodiment of the present invention utilizes the OMIM(™) (Hamosh et al, 2002) database published by NCBI, which summarizes research publications relating to genes which have been shown to be associated with diseases. Finally, the specific possible utility of the target gene is evaluated. While this process too may be facilitated by bioinformatic means, it might require manual evaluation of published scientific research regarding the target gene, in order to determine the utility of the target gene to the diagnosis and or treatment of specific disease. Only potential novel oligonucleotides, the target genes of which have passed all three examinations, are accepted as novel oligonucleotide.

[0259] Reference is now made to FIG. 16, which is a simplified diagram describing each of a plurality of novel bioinformatically detected regulatory polynucleotide, referred to here as Genomic Record (GR) polynucleotide which encodes an ‘operon-like’ cluster of novel micro RNA-like oligonucleotides each of which in turn modulates expression of at least one target gene, the function and utility of which at least one target gene is known in the art. GR GPRECURSOR DNA is a novel bioinformatically detected regulatory, non protein coding, polynucleotide. The method by which GR polynucleotide as detected is described hereinabove with additional reference to FIGS. 9-18. GR GPRECURSOR DNA encodes GR PRECURSOR RNA, an RNA molecule, typically several hundreds to several thousands nucleotides long. GR PRECURSOR RNA folds spatially, forming GR FOLDED PRECURSOR RNA. It is appreciated that GR FOLDED PRECURSOR RNA comprises a plurality of what is known in the art as ‘haipin’ structures. These ‘hairpin structures’ are due to the fact that the nucleotide sequence of GR PRECURSOR RNA comprises a plurality of segments, the first half of each such segment having a nucleotide sequence which is at least a partial or accurate complementary sequence of the second half thereof, as is well known in the art. GR FOLDED PRECURSOR RNA is naturally processed by cellular enzymatic activity into separate GAM precursor RNAs, herein schematically represented by GAM1 FOLDED PRECURSOR RNA through GAM3 FOLDED PRECURSOR RNA, each of which GAM precursor RNAs being a hairpin shaped RNA segment, corresponding to GAM FOLDED PRECURSOR RNA of FIG. 8. The above mentioned GAM precursor RNAs are diced by DICER COMPLEX of FIG. 8, yielding respective short RNA segments of about 22 nucleotides in length, schematically represented by GAM1 RNA through GAM3 RNA, each of which GAM RNAs corresponding to GAM RNA of FIG. 8. GAM1 RNA, GAM2 RNA and GAM3 RNA, each bind complementarily to binding sites located in untranslated regions of respective target genes, designated GAM1-TARGET RNA, GAM2-TARGET RNA and GAM3-TARGET RNA, respectively, which target binding site corresponds to a target binding site such as BINDING SITE I, BINDING SITE II or BINDING SITE III of FIG. 8. This binding inhibits translation of the respective target proteins designated GAM1-TARGET PROTEIN, GAM2-TARGET PROTEIN and GAM3-TARGET PROTEIN respectively. It is appreciated that specific functions, and accordingly utilities, of each GR polynucleotides of the present invention, correlates with, and may be deduced from, the identity of the target genes, which are inhibited by GAM RNAs comprised in the ‘operon-like’ cluster of said GR polynucleotide schematically represented by GAM1 TARGET PROTEIN through GAM3 TARGET PROTEIN.

[0260] A listing of GAM oligonucleotide comprised in each of a plurality of GR polynucleotide of FIG. 16 is provided in Table 10, hereby incorporated herein. Nucleotide sequences of each said GAM oligonucleotide and their respective genomic source and chromosomal location are further described hereinbelow with reference to Table 3 hereby incorporated herein. GAM TARGET GENEs of each of said GAM oligonucleotides are elaborated hereinbelow with reference to Table 7, hereby incorporated herein. The functions of each of said GAM TARGET GENEs and their association with various diseases, and accordingly the utilities of said each of GAM oligonucleotides and hence the functions and utilities of each of said GR polynucleotides are elaborated hereinbelow with reference to Table 8, hereby incorporated herein. Studies establishing known functions of each of said GAM TARGET GENEs, and correlation of each of said GAM TARGET GENEs to known diseases are listed in Table 9, and are hereby incorporated herein.

[0261] The present invention discloses 246 novel genes of the GR group of polynucleotides, which have been detected bioinformatically. Laboratory confirmation of 2 polynucleotides of the GR group of polynucleotides is described hereinbelow with reference to FIGS. 23A-24D.

[0262] In summary, the current invention discloses a very large number of novel GR polynucleotides each of which encodes a plurality of GAM oligonucleotides, which in turn may modulate expression of a plurality of target proteins. It is appreciated therefore that the function of GR polynucleotides is in fact similar to that of the Genomic Records concept of the present invention addressing the differentiation enigma, described hereinabove with reference to FIG. 7.

[0263] Reference is now made to FIG. 17 which is a simplified diagram illustrating a mode by which oligonucleotides of a novel group of operon-like polynucleotide described hereinabove with reference to FIG. 16 of the present invention, modulate expression of other such polynucleotide, in a cascading manner.GR1 PRECURSOR DNA and GR2 PRECURSOR DNA are two polynucleotides of the novel group of operon-like polynucleotides designated GR PRECURSOR DNA(FIG. 16). As is typical of polynucleotides of the GR group of polynucleotides GR1 PRECURSOR DNA and GR2 PRECURSOR DNA, each encode a long RNA precursor, which in turn folds into a folded RNA precursor comprising multiple hairpin shapes, and is cut into respective separate hairpin shaped RNA segments, each of which RNA segments being diced to yield a n oligonucleotide of a group of oligonucleotide designated GAM RNA. In this manner GR1 yields GAM1 RNA, GAM2 RNA and GAM3 RNA, and GR2 yields GAM4 RNA, GAM5 RNA and GAM6 RNA. As FIG. 17 shows, GAM3 RNA, which derives from GR1, binds a binding site located adjacent to GR2 GPRECURSOR DNA thus modulating expression of GR2, thereby invoking expression of GAM4 RNA, GAM5 RNA and GAM6 RNA which derive from GR2. It is appreciated that the mode of modulation of expression presented by FIG. 17 enables an unlimited ‘cascading effect’ in which a GR polynucleotide comprises multiple GAM oligonucleotides each of which may modulate expression of other GR polynucleotides each such GR polynucleotides comprising additional GAM oligonucleotide etc., whereby eventually certain GAM oligonucleotides modulate expression of target proteins. This mechanism is in accord with the conceptual model of the present invention addressing the differentiation enigma, described hereinabove with specific reference to FIGS. 6-7.

[0264] Reference is now made to FIG. 18 which is a block diagram illustrating an overview of a methodology for finding novel oligonucleotides and operon-like polynucleotides of the present invention, and their respective functions. According to a preferred embodiment of the present invention, the methodology to finding novel oligonucleotides of the present invention and their function comprises of the following major steps: First, FIND GAM OLIGONUCLEOTIDES 146 is used to detect, oligonucleotide of the novel group of oligonucleotide of the present invention, referred to here as GAM oligonucleotide. GAM oligonucleotides are located and their function elicited by detecting target proteins they bind and the function of those target proteins, as described hereinabove with reference to FIGS. 9-15. Next, FIND GR POLYNUCLEOTIDES 147 is used to detect polynucleotide of a novel group of operon-like polynucleotide of the present invention, referred to here as GR polynucleotide. GR polynucleotides are located, by locating clusters of proximally located GAM oligonucleotide, based on the previous step. Consequently, FIND HIERARCHY OF GR POLYNUCLEOTIDES 148 elicits the hierarchy of GR and GAM: binding sites for non-protein-binding GAM oligonucleotide comprised in each GR polynucleotide found are sought adjacent to other GR polynucleotides. When found, such a binding site indicates that the connection between the GAM and the GR the expression of which it modulates, and thus the hierarchy of the GR polynucleotides and the GAM oligonucleotides they comprise. Lastly, DEDUCE FUNCTION OF HIGH GR POLYNUCLEOTIDES AND GAM OLIGONUCLEOTIDES 149 is used to deduce the function of GR polynucleotides and GAM oligonucleotides which are ‘high’ in the hierarchy, i.e. GAM oligonucleotides which modulate expression of other GR polynucleotides rather than directly modulating expression of target proteins. A preferred approach is as follows: The function of protein-modulating GAM oligonucleotides is deducible from the proteins which they modulate, provided that the function of these target proteins is known. The function of ‘higher’ GAM oligonucleotides may be deduced by comparing the function of protein-modulating GAM oligonucleotides with the hierarchical relationships by which the ‘higher’ GAM oligonucleotides are connected to the protein-modulating GAM oligonucleotides. For example, given a group of several protein-modulating GAM oligonucleotides which collectively cause a protein expression pattern typical of a certain cell-type, then a ‘higher’ GAM oligonucleotide is sought which modulates expression of GR polynucleotides which perhaps modulate expression of other GR polynucleotides which eventually modulate expression of the given group of protein- modulating GAM oligonucleotide. The ‘higher’ GAM oligonucleotide found in this manner is taken to be responsible for differentiation of that cell-type, as per the conceptual model of the invention described hereinabove with reference to FIG. 6.

[0265] Reference is now made to FIG. 19 which is a block diagram illustrating different utilities of oligonucleotide of the novel group of oligonucleotides of the present invention referred to here as GAM oligonucleotides and GR polynucleotides. The present invention discloses a first plurality of novel oligonucleotides referred to here as GAM oligonucleotides and a second plurality of operon-like polynucleotides referred to here as GR polynucleotides each of the GR polynucleotide encoding a plurality of GAM oligonucleotides The present invention further discloses a very large number of known target genes, which are bound by, and the expression of which is modulated by each of the novel oligonucleotides of the present invention. Published scientific data referenced by the present invention provides specific, substantial, and credible evidence that the above mentioned target genes modulated by novel oligonucleotides of the present invention, are associated with Alzheimers disease. Specific novel oligonucleotides of the present invention, target genes associated with Alzheimers diseases are described hereinbelow with reference to Tables 1 through 11. It is therefore appreciated that a function of GAM oligonucleotides and GR polynucleotides of the present invention is modulation of expression of target genes related to Alzheimers disease, and that therefore utilities of novel oligonucleotides of the present invention include diagnosis and treatment of Alzheimers disease. FIG. 19 describes various types of diagnostic and therapeutic utilities of novel oligonucleotides of the present invention. A utility of novel oligonucleotides of the present invention is detection of GAM oligonucleotides and of GR polynucleotides. It is appreciated that since GAM oligonucleotides and polynucleotides modulate expression of disease related target genes, that detection of expression of GAM oligonucleotides in clinical scenarios associated with said diseases is a specific, substantial and credible utility. Diagnosis of novel oligonucleotides of the present invention may preferably be implemented by RNA expression detection techniques, including but not limited to biochips, as is well known in the art. Diagnosis of expression of oligonucleotides of the present invention may be useful for research purposes, in order to further understand the connection between the novel oligonucleotides of the present invention and the Alzheimers disease, for disease diagnosis and prevention purposes, and for monitoring disease progress. Another utility of novel oligonucleotides of the present invention is anti-GAM therapy, a mode of therapy which allows up regulation of the disease related target gene of a novel GAM oligonucleotide of the present invention, by lowering levels of the novel GAM oligonucleotide which naturally inhibits expression of that target gene. This mode of therapy is particularly useful with respect to target genes which have been shown to be under-expressed in association with Alzheimers disease. Anti-GAM therapy is further discussed hereinbelow with reference to FIGS. 20A and 20B. A further utility of novel oligonucleotides of the present invention is GAM replacement therapy, a mode of therapy which achieves down regulation of Alzheimers related target gene of a novel GAM oligonucleotide of the present invention, by raising levels of the GAM which naturally inhibits expression of that target gene. This mode of therapy is particularly useful with respect to target genes which have been shown to be over-expressed in Alzheimers disease. GAM replacement therapy involves introduction of supplementary GAM products into a cell, or stimulation of a cell to produce excess GAM products. GAM replacement therapy may preferably be achieved by transfecting cells with an artificial DNA molecule encoding a GAM which causes the cells to produce the GAM product, as is well known in the art. Yet a further utility of novel oligonucleotides of the present invention is modified GAM therapy. Disease conditions are likely to exist, in which a mutation in a binding site of a GAM RNA prevents natural GAM RNA to effectively bind inhibit a disease related target gene, causing up regulation of that target gene, and thereby contributing to the disease pathology. In such conditions, a modified GAM oligonucleotides is designed which effectively binds the mutated GAM binding site, i.e. is an effective anti-sense of the mutated GAM binding site, and is introduced in disease effected cells. Modified GAM therapy is preferably achieved by transfecting cells with an artificial DNA molecule encoding the modified GAM which causes the cells to produce the modified GAM product, as is well known in the art. An additional utility of novel GAM of the present invention is induced cellular differentiation therapy. As aspect of the present invention is finding oligonucleotides which determine cellular differentiation, as described hereinabove with reference to FIG. 18. Induced cellular differentiation therapy comprises transfection of cell with such GAM oligonucleotides thereby determining their differentiation as desired. It is appreciated that this approach may be widely applicable, inter alia as a means for auto transplantation harvesting cells of one cell-type from a patient, modifying their differentiation as desired, and then transplanting them back into the patient. It is further appreciated that this approach may also be utilized to modify cell differentiation in vivo, by transfecting cells in a genetically diseased tissue with a cell-differentiation determining GAM thus stimulating these cells to differentiate appropriately.

[0266] Reference is now made to FIGS. 20A and 20B, simplified diagrams which when taken together illustrate anti-GAM therapy mentioned hereinabove with reference to FIG. 19. A utility of novel GAMs of the present invention is anti-GAM therapy, a mode of therapy which allows up regulation of Alzheimers disease related target gene of a novel GAM of the present invention, by lowering levels of the novel GAM which naturally inhibits expression of that target gene. FIG. 20A shows a normal GAM inhibiting translation of a target gene of GAM RNA by binding to a BINDING SITE found in an untranslated region of GAM TARGET RNA, as described hereinabove with reference to FIG. 8.

[0267] FIG. 20B shows an example of anti-GAM therapy. ANTI-GAM RNA is short artificial RNA molecule the sequence of which is an anti-sense of GAM RNA. Anti-GAM treatment comprises transfecting diseased cells with ANTI-GAM RNA, or with a DNA encoding thereof. The ANTI-GAM RNA binds the natural GAM RNA, thereby preventing binding of natural GAM RNA to its BINDING SITE. This prevents natural translation inhibition of GAM TARGET RNA by GAM RNA, thereby up regulating expression of GAM TARGET PROTEIN.

[0268] It is appreciated that anti-GAM therapy is particularly useful with respect to target genes which have been shown to be under-expressed in Alzheimers disease. Furthermore, anti-GAM therapy is particularly useful, since it may be used in situations in which technologies known in the art as RNAi and siRNA can not be utilized. As in known in the art, RNAi and siRNA are technologies which offer means for artificially inhibiting expression of a target protein, by artificially designed short RNA segments which bind complementarily to mRNA of said target protein. However, RNAi and siRNA can not be used to directly up regulate translation of target proteins.

[0269] Reference is now made to FIG. 21A, which is a histogram representing the distribution of known miRNA oligonucleotides and that of hairpin structures extracted from expressed genome sequences with respect to their HAIRPIN DETECTOR score. The known miRNA oligonucleotide s set is taken from RFAM database, Release2.1 and include 440 miRNA oligonucleotides from H. sapienas, M. musculus, C. elegans, C. brigassae and D. melanogaster. Folding of expressed genome sequences taken from public databases of ESTs (Unigene-NCBI and TIGR) identified 342,882 hairpin structures. ˜154,000 out of the 342,882 hairpin structures did not pass the filter of being identified as hairpins in several secondary structure folding versions of the given genomic sequence, as described hereinabove with reference to FIG. 12B, and hence did not receive a Hairpin detector score. Furthermore, ˜133,000 hairpin structures did not pass the filter of minimum score of the DICER-CUT LOCATION DETECTOR 116 (FIG. 9) (those ˜287,000 hairpin structures are not represented in the histogram). Hairpin structures are considered as miRNA-like precursor oligonucleotides here referred to as GAM oligonucleotide, if their Hairpin detector score is above 0.3. Thus, the GAM oligonucleotides set is comprised of 40,000 hairpin structures, of those ˜5100 received a high Hairpin detector score (>=0.7). These are much higher numbers than those of the known miRNA oligonucleotides and of the upper bound of ˜255 human miRNA oligonucleotide s, estimated by Bartel et al (Science,299,1540, March 2003). Of the reference set that pass the above filter (408/440), 284 (69%) received a high Hairpin detector score (>=0.7).

[0270] Reference is now made to FIG. 21B, which is a table summarizing laboratory validation results that validate efficacy of the BIOINFORMATIC OLIGONUCLEOTIDE DETECTION ENGINE 100 ( FIG. 9). In order to assess efficacy of the BIOINFORMATIC OLIGONUCLEOTIDE DETECTION ENGINE 100, novel oligonucleotides predicted thereby are preferably divided into 4 detection accuracy groups (first column), designated A through D, ranking GAMS from the most probable GAMs to the least probable GAMs, using the scores of HAIRPIN DETECTOR 114 (FIG. 9) and DICER-CUT LOCATION DETECTOR 116 (FIG. 9) as follows:

[0271] Group A: The score of the HAIRPIN-DETECTOR is above 0.7, the overall score of the two-phased predictor is above 0.55, and the score of the second phase of the two-phased predictor is above 0.75, or the score of the EDIT-DISTANCE predictor is equal or above 17. In this group, one Dicer cut location is predicted for each hairpin. Group B: The score of the HAIRPIN-DETECTOR is above 0.5, the overall score of the two-phased predictor is above 0.55, and the hairpin is not in group A. Group C: The score of the HAIRPIN-DETECTOR is between 0.4 and 0.5, and the overall score of the two-phased predictor is above 0.55. Group D: The score of the HAIRPIN-DETECTOR is between 0.3 and 0.4, and the overall score of the two-phased predictor is above 0.55. In groups B, C and D, if the score of the second phase of the two-phased predictor is above 0.75, one Dicer cut location is predicted for each hairpin, otherwise both sides of the double stranded window are given as output, and are examined in the lab or used for binding site search. The groups are mutually exclusive, i.e. in groups A, C and D all hairpins score less than 17 in the EDIT-DISTANCE predictor.

[0272] It is appreciated that the division into groups is not exhaustive: 410 of the 440 published hairpins (second column), and 1419 of the 1708 novel GAMs, belong to one of the groups. An indication of the real performance of the two-phased predictor in the presence of background hairpins is given by the column ‘precision on hairpin mixture’ (third column). The precision on hairpin mixture is computed by mixing the published miRNA hairpins with background hairpins in a ratio of 1:4 and taking as a working assumption that they are hairpins not carrying a ‘diced’ miRNA.-like oligonucleotide This is a strict assumption, since some of these background hairpins may indeed contain ‘diced’ miRNAs-like oligonucleotide, while in this column they are all counted as failures

[0273] Sample novel bioinformatically predicted human GAMs of each of these groups are sent to the laboratory for validation (fourth column), and the number (fifth column) and percent (sixth column) of successful validation of predicted human GAM is noted for each of the groups, as well as overall (bottom line). The number of novel VAM genes explicitly specified by present invention belonging to each of the four groups is noted (seventh column).

[0274] It is appreciated that the present invention comprises 1419 novel GAM oligonucleotides, which fall into one of these four detection accuracy groups, and that the BIOINFORMATIC OLIGONUCLEOTIDE DETECTION ENGINE 100 (FIG. 9) is substantiated by a group of 52 novel human GAM oligonucleotides validated by laboratory means, out of 168 human GAM oligonucleotides which were tested in the lab, resulting in validation of an overall 31% accuracy. The top group demonstrated 37% accuracy. Pictures of test-results of specific human GAM oligonucleotides in the abovementioned four groups, as well as the methodology used for validating the expression of predicted oligonucleotides are elaborated hereinbelow with reference to FIG. 22.

[0275] It is further appreciated that failure to detect a predicted GAM oligonucleotide in the lab does not necessarily indicate a mistaken bioinformatic prediction. Rather, it may be due to technical sensitivity limitation of the lab test, or because the GAM oligonucleotides not expressed in the tissue examined, or at the development phase tested.

[0276] It is still further appreciated that in general these findings are in agreement with the expected bioinformatic accuracy, as describe hereinabove with reference to FIG. 13B: assuming 80% accuracy of the HAIRPIN DETECTOR 114 and 80% accuracy of the DICER-CUT LOCATION DETECTOR 116 and 80% accuracy of the lab validation, this would result in 50% overall accuracy of the GAM oligonucleotide validated in the lab.

[0277] Reference is now made to FIG. 22A which is a picture of laboratory results validating the expression of 43 novel genes detected by the BIOINFORMATIC OLIGONUCLEOTIDE DETECTION ENGINE 100 (FIG. 9).

[0278] Reference is now made to FIG. 22A and FIG. 22B which are pictures and a summary table of laboratory results validating the expression of 43 novel human GAM oligonucleotides detected by the BIOINFORMATIC OLIGONUCLEOTIDE DETECTION ENGINE100. In each row in FIG. 22A, pictures of several oligonucleotides validated by hybridization of Polymerase Chain Reaction (PCR)-product southern-blots, are provided, each corresponding to a specific GAM oligonucleotides, as elaborated hereinbelow. To test our validation method, we used a reference set of 8 known human miRNA oligonucleotides, as blind test to our laboratory. These PCR-product hybridization pictures are designated 1 through 8 for the reference set known miRNA oligonucleotides; and 9 through 51 for predicted GAM oligonucleotides.

[0279] In each PCR hybridization picture, 2 lanes are seen: the test lane, designated “+” and the control lane, designated “−”. For convenience of viewing the results, all PCR-product hybridization pictures of FIG. 22A have been shrunk ×4 vertically. It is appreciated that for each of the tested GAM oligonucleotides a clear hybridization band appears in the test (“+”) lane, but not in the control (“−”) lane.

[0280] Specifically, FIG. 22A shows pictures of PCR-product hybridization validation by southern-blot, the methodology of which is described hereinbelow, to the following novel human GAM oligonucleotides (RosettaGenomics Ltd. Nomenclature, ‘A’ and ‘B’ referred to the Dicer Cut Location as described hereinabelow with reference to the description of large tables:

[0281] (1)hsa-MIR-21; (2)hsa-MIR-27b; (3)hsa-MIR-186; (4)hsa-MIR-93; (5)hsa-MIR-26a ; (6)hsa-MIR-191; (7)hsa-MIR-31; (8)hsa-MIR-92; (9) GAM3418-A (later published by other researchers as hsa-MIR23); (10) GAM4426-A; (11) GAM281-A; (12) GAM7553-A; (13) GAM5385-A; (14) GAM2608-A; (15) GAM1032-A; (16) GAM3431-A; (17) GAM7933-A; (18) GAM3298-A.; (19) GAM7080-A; (20)GAM895-A.; (21) GAM3770.1; (22) GAM337162-A; (23) GAM8678-A; (24) GAM2033-A; (25)GAM7776-A; (26) GAM8145-A; (27) GAM25-A; (28) GAM7352.1; (29) GAM337624-A; (30) GAM1479-A; (31) GAM2270-A; (32) GAM7591-A; (33) GAM8285-A; (34) GAM6773-A; (35) GAM336818-A; (36) GAM336487-A; (37) GAM337620-A; (38) GAM336809-A; (39) GAM5346-A; (40) GAM8554-A; (41)GAM2071-A; (42) GAM7957-A; (43) GAM391-A; (44) GAM6633-A; (45) GAM19; (46) GAM8358-A; (47) GAM3229-A; an)GAM 7052-A; (49) GAM3027-A; (50) GAM21and (51) GAM oligonucleotide similar to mmu-MIR-30e.

[0282] The next validated GAM oligonucleotides are highly similar or highly identical to known mouse-miRNA oligonucleotides: GAM3027-A, similar to mmu-MIR-29c; GAM21, similar to mmu-MIR-130b; and GAM oligonucleotide which is highly similar to mmu-MIR-30e (picture number 51). In addition to the PCR- product hybridization detection, the following GAMs were cloned and sequenced: GAM3418-A, GAM5385-A, GAM1032-A, GAM3298-A, GAM7080-A, GAM1338-A, GAM7776-A, GAM25-A, GAM337624-A, GAM1479-A, GAM6773-A, GAM336818-A, GAM336487-A, GAM337620-A, GAM336809-A, GAM3027-A, GAM21, and GAM oligonucleotide similar to mmu-MIR-30e (picture number 51). Furthermore, the following GAM oligonucleotides were sequenced directly from the ligation reaction by the method described hereinbelow under LIGATION-PCR DIAGNOSTIC METHOD: GAM4426-A, GAM7553-A, GAM2270-A, and GAM7591-A.

[0283] In order to validate the expression of predicted novel GAM and assuming that these novel GAM oligonucleotides are probably expressed at low concentrations, a PCR product cloning approach was set up through the following strategy: two types of cDNA libraries designated “One tailed” and “Ligation” were prepared from frozen HeLa S100 extract (4c Biotech, Belgium) size fractionated RNA. Essentially, Total S100 RNA was prepared through an SDSProteinase K incubation followed by an acid Phenol-Chloroform purification and Isopropanol precipitation. Alternatively, total HeLa RNA was also used as starting material for these libraries.

[0284] Fractionation was done by loading up to 500 g per YM100 Amicon Microcon column (Millipore) followed by a 500 g centrifugation for 40 minutes at 4C. Flow through “YM 100”RNA consisting of about of the total RNA was used for library preparation or fractionated further by loading onto a YM30 Amicon Microcon column (Millipore) followed by a 13,500 g centrifugation for 25 minutes at 4C. Flowthrough “YM30” was used for library preparation as is and consists of less than 0.5% of total RNA. For the both the “ligation” and the “One-tailed” libraries, RNA was dephosphorilated and ligated to an RNA (lowercase)-DNA (UPPERCASE) hybrid 5″-phosphorilated, 3″ idT blocked 3″-adapter (5″-P-uuuAACCGCATCCTTCTC-idT-3″ Dharmacon # P-002045-01-05) (as elaborated in Elbashir et al., Genes Dev. 15:188-200 (2001)) resulting in ligation only of RNase III type cleavage products. 3″-Ligated RNA was excised and purified from a half 6%, half 13% polyacrylamide gel to remove excess adapter with a Nanosep 0.2M centrifugal device (Pall) according to instructions, and precipitated with glycogen and 3 volumes of Ethanol. Pellet was resuspended in a minimal volume of water.

[0285] For the “ligation” library a DNA (UPPERCASE)-RNA (lowercase) hybrid 5″-adapter
[0286] (5″-TACTAATACGACTCACTaaa-3″ Dharmacon # P-002046-01-05) was ligated to the 3″-adapted RNA, reverse transcribed with “EcoRI-RT”:
[0287] (5 ″-GACTAGCTGGAATTCAAGGATGCGGTTAAA- 3″), PCR amplified with two external primers essentially as in Elbashir et al 2001 except that primers were “EcoRI-RT”and “PstI
[0288] Fwd”(5 ″-CAGCCAACGCTGCAGATACGACTCACTAAA- 3″).

[0289] This PCR product was used as a template for a second round of PCR with one hemispecific and one external primer or with two hemispecific primers.

[0290] For the “One tailed” library the 3″-Adapted RNA was annealed to 20 pmol primer “EcoRI RT” by heating to 70C and cooling 0.1C/sec to 30C and then reverse transcribed with Superscript II RT (According to instructions, Invitrogen) in a 20I volume for 10 alternating 5 minute cycles of 37C and 45C. Subsequently, RNA was digested with 1I 2M NaOH, 2 mM EDTA at 65C for 10 minutes. cDNA was loaded on a polyacrylamide gel, excised and gel-purified from excess primer as above (invisible, judged by primer run alongside) and resuspended in 13I of water. Purified cDNA was then oligo-dC tailed with 400U of recombinant terminal transferase (Roche molecular biochemicals), 1I 100M dCTP, 1I 15 mM CoCI2, and 4I reaction buffer, to a final volume of 20I for 15 minutes at 37C. Reaction was stopped with 2I 0.2M EDTA and 15I 3M NaOAc pH 5.2. Volume was adjusted to 150I with water, Phenol:Bromochloropropane 10:1 extracted and subsequently precipitated with glycogen and 3 volumes of Ethanol. C-tailed cDNA was used as a template for PCR with the external primers “T3-PstBsg(G/I)18”(5″-AATTAACCCTCACTAAAGGCTGCAG GTGCAGGIGGGIIGGGIIGGGIIGN-3″ where I stands for Inosine and N for any of the 4 possible deoxynucleotides), and with “EcoRI Nested”(5″-GGAATTCAAGGATGCGGTTA-3″). This PCR product was used as a template for a second round of PCR with one hemispecific and one external primer or with two hemispecific primers.

[0291] Hemispecific primers were constructed for each predicted GAM RNA oligonucleotide by an in-house program designed to choose about half of the 5″ or 3″ sequence of the GAM RNA corresponding to a TM of about 30-34C constrained by an optimized 3″ clamp, appended to the cloning adapter sequence (for “One-tailed” libraries 5″-GGNNGGGNNG on the 5″ end of the GAM RNA, or TTTAACCGCATC-3″ on the 3″ end of the GAM RNA. For “Ligation” libraries the same 3″ adapter and 5″-CGACTCACTAAA on the 5″ end). Consequently, a fully complementary primer of a TM higher than 60C was created covering only one half of the GAM RNA sequence permitting the unbiased elucidation by sequencing of the other half.

[0292] CONFIRMATION OF GAM OLIGONUCLEOTIDE SEQUENCE AUTHENTICITY OF PCR PRODUCTS:

[0293] SOUTHERN BLOT:PCR-product sequences were confirmed by southern blot (Southern E. M., Biotechnology, 1992,24:122-39 (1975)) and hybridization with DNA oligonucleotide probes synthesized against predicted GAM RNAs oligonucleotides. Gels were transferred onto a Biodyne PLUS 0.45 m, (Pall) positively charged nylon membrane and UV cross-linked. Hybridization was performed overnight with DIG-labeled probes at 420C in DIG EasyHyb buffer (Roche). Membranes were washed twice with 2×SSC and 0.1% SDS for 10 min. at 420C and then washed twice with 0.5×SSC and 0.1% SDS for 5 min at 420C. The membrane was then developed by using a DIG luminescent detection kit (Roche) using anti-DIG and CSPD reaction, according to the manufacturer's protocol. All probes were prepared according to the manufacturers (Roche Molecular Biochemicals) protocols: Digoxigenin (DIG) labeled antisense transcripts was prepared from purified PCR products using a DIG RNA labeling kit with T3 RNA polymerase. DIG labeled PCR was prepared by using a DIG PCR labeling kit. 3″-DIG-tailed oligo ssDNA antisense probes, containing DIG-dUTP and dATP at an average tail length of 50 nucleotides were prepared from 100 pmole oligonucleotides with the DIG Oligonucleotide Labeling Kit.

[0294] CLONE-SEQUENCING: PCR products were inserted into pGEM-T (Promega) or pTZ57 (MBI Fermentas), transformed into competent JM109 E. coli (Promega) and sown on LB-Amp plates with IPTG/Xgal. White and light-blue colonies were transferred to duplicate gridded plates, one of which was blotted onto a membrane (Biodyne Plus, Pall) for hybridization with DIG tailed oligo probes (according to instructions, Roche) corresponding to the expected GAM. Plasmid DNA from positive colonies was sequenced.

[0295] LIGATION-PCR DIAGNOSTIC METHOD: To further validate predicted GAM PCR product sequence derived from hemiprimers, a PCR based diagnostic technique was devised to amplify only those products containing also at least two additional nucleotides of the non hemi-primer defined part of the predicted GAM RNA oligonucleotide. In essence, a diagnostic primer was designed so that its 3″ end, which is the specificity determining side, was identical to the desired GAMRNA oligonucleotide, 2-10 nucleotides (typically 4-7, chosen for maximum specificity) further into its 3″ end than the nucleotide stretch primed by the hemi-primer. The hemi-primer PCR product was first ligated into a T-cloning vector (pTZ57/T or pGEM-T) as described herinabove. The ligation reaction mixture was used as template for the diagnostic PCR under strict annealing conditions with the new diagnostic primer in conjunction with a general plasmid-homologous primer, resulting in a distinct ˜200 base-pair product. This PCR product can be directly sequenced, permitting the elucidation of the remaining nucleotides up to the 3″ of the mature GAM RNA oligonucleotide adjacent to the 3″ adapter. Alternatively, following analysis of the diagnostic PCR reaction on an agarose gel, positive ligation reactions (containing a band of the expected size) were transformed into E. coli. Using this same diagnostic technique and as an alternative to screening by Southern-blot colonyhybridization, transformed bacterial colonies were screened by colony-PCR (Gussow,D. and Clackson,T, Nucleic Acids Res. 17: 4000 (1989)) prior to plasmid purification and sequencing.

[0296] Reference is now made to FIG. 22B which is a table summarizing laboratory results which validate the expression of 8 known human miRNA oligonucleotides and 43 novel GAM oligonucleotides detected by the BIOINFORMATIC OLIGONUCLEOTIDE DETECTION ENGINE 100. The table gives additional information on the above GAM oligonucleotides and contains the following fields:: NUMBER: refer to the hybridization picture number of FIG. 22A; NAME: indicate the known MIR name for the reference set or GAM's name as given by RosettaGenomices nomenclature method; SEQUENCE: 5′ to 3′ sequence of the mature, ‘diced’ oligonucleotide; SEQUENCED: ‘+’ indicates a validation of the GAM RNA sequence by sequencing procedure as described hereinabove with reference to FIG. 22A.

[0297] Reference is now made to FIG. 23A, which is a schematic representation of a novel human GR polynucleotide herein designated GR12731 (RosettaGenomics Ltd. nomenclature), located on chromosome 9, comprising 2 known human MIR genes-MIR24 and MIR23, and 2 novel GAM oligonucleotides, herein designated GAM22 and GAM116, all marked by solid black boxes. FIG. 23A also schematically illustrates 6 non-GAM hairpin sequences, and one non-hairpin sequence, all marked by white boxes, and serving as negative controls. By “non-GAM hairpin sequences” is meant sequences of a similar length to known MIR PRECURSOR sequences, which form hairpin secondary folding pattern similar to MIR PRECURSOR hairpins, and yet which are assessed by the BIOINFORMATIC OLIGONUCLEOTIDE DETECTION ENGINE 100 not to be valid GAM PRECURSOR hairpins. It is appreciated that FIG. 23A is a simplified schematic representation, reflecting only the order in which the segments of interest appear relative to one another, and not a proportional distance between the segments.

[0298] Reference is now made to FIG. 23B, which is a schematic representation of secondary folding of each of the MIRs and GAMs of GR GR12731 MIR24, MIR23, GAM22 and GAM116, and of the negative control non-GAM hairpins, herein designated N2, N3, N116, N4, N6 and N7. N0 is a non-hairpin control, of a similar length to that of known MIR PRECURSOR hairpins. It is appreciated that the negative controls are situated adjacent to and in between real MIR genes and GAM predicted oligonucleotide and demonstrates similar secondary folding patterns to that of known MIRs and GAMs.

[0299] Reference is now made to FIG. 23C, which is a picture of laboratory results of a PCR test upon a YM100 “ligation”-library, utilizing specific primer sets directly inside the boundaries of the hairpins. Due to the nature of the library the only PCR amplifiable products can result from RNaseIII type enzyme cleaved RNA, as expected for legitimate hairpin precursors presumed to be produced by DROSHA (Lee et al, Nature 425 415-419, 2003). FIG. 23C demonstrates expression of hairpin precursors of known MIR genes-MIRhsa-23 and MIRhsa-24, and of novel bioinformatically detected GAM22 and GAM116 hairpins predicted bioinformatically by a system constructed and operative in accordance with a preferred embodiment of the present invention. FIG. 23C also shows that none of the 7 controls (6 hairpins designated N2, N3, N23, N4, N6 and N7 and 1 non-hairpin sequence designated NO) were expressed. N116 is a negative control sequence partially overlapping GAM116.

[0300] In the picture, test lanes including template are designated 11“+” and the control lane is designated “−”. It is appreciated that for each of the tested hairpins, a clear PCR band appears in the test (“+”) lane, but not in the control (“−”) lane.

[0301] FIGS. 23A through 23C, when taken together validate the efficacy of the bioinformatic oligonucleotide detection engine in: (a) detecting known MIR genes; (b) detecting novel GAM PRECURSOR hairpins which are found adjacent to these MIR genes, and which despite exhaustive prior biological efforts and bioinformatic detection efforts, went undetected; (c) discerning between GAM (or MIR) PRECURSOR hairpins, and non-GAM hairpins.

[0302] It is appreciated that the ability to discern GAM-hairpins from non-GAM-hairpins is very significant in detecting GAM oligonucleotide since hairpins in general are highly abundant in the genome. Other MIR prediction programs have not been able to address this challenge successfully.

[0303] Reference is now made to FIG. 24A which is an annotated sequence of an EST comprising a novel GAM oligonucleotides detected by the oligonucleotide detection system of the present invention. FIG. 24A shows the nucleotide sequence of a known human non-protein coding EST (Expressed Sequence Tag), identified as EST72223. The EST72223 clone obtained from TIGR database (Kirkness and Kerlavage, 1997) was sequenced to yield the above 705 bp transcript with a polyadenyl tail. It is appreciated that the sequence of this EST comprises sequences of one known miRNA oligonucleotide, identified as hsa-MIR98, and of one novel GAM oligonucleotide referred to here as GAM25, detected by the BIOINFORMATIC OLIGONUCLEOTIDE DETECTION ENGINE 100 (FIG. 9) of the present invention.

[0304] The sequences of the precursors of the known MIR98 and of the predicted GAM25 are precursor in bold, the sequences of the established miRNA 98 and of the predicted miRNA-like oligonucleotide GAM25 are underlined.

[0305] Reference is now made to FIGS. 24B, 24C and 24D that are pictures of laboratory results, which when taken together demonstrate laboratory confirmation of expression of the bioinformatically detected novel oligonucleotide of FIG. 24A. In two parallel experiments, an enzymatically synthesized capped, EST72223 RNA transcript, was incubated with Hela S100 lysate for 0 minutes, 4 hours and 24 hours. RNA was subsequently harvested, run on a denaturing polyacrylamide gel, and reacted with a 102 nt and a 145 nt antisense MIR98 and GAM25 precursor transcript probes respectively. The Northern blot results of these experiments demonstrated processing of EST72223 RNA by Hela lysate (lanes 2-4, in 24B and 24C), into ˜80 bp and ˜22 bp segments, which reacted with the MIR98 precursor probe (24B), and into ˜100 bp and ˜24 bp segments, which reacted with the GAM25 precursor probe (24C). These results demonstrate the processing of EST72223 by Hela lysate into MIR98 precursor and GAM25 precursor. It is also appreciated from FIG. 24C (lane 1) that Hela lysate itself reacted with the GAM25 precursor probe, in a number of bands, including a ˜100 bp band, indicating that GAM25-precursor is endogenously expressed in Hela cells. The presence of additional bands, higher than 100 bp in lanes 5-9 probably corresponds to the presence of nucleotide sequences in Hela lysate, which contain the GAM25 sequence.

[0306] In addition, in order to demonstrate the kinetics and specificity of the processing of MIR98 and GAM25 precursors into their respective mature, ‘diced’ segments, transcripts of MIR98 and of the bioinformatically predicted GAM25 precursors were similarly incubated with Hela S100 lysate, for 0 minutes, 30 minutes, 1 hour and 24 hours, and for 24 hours with the addition of EDTA, added to inhibit Dicer activity, following which RNA was harvested, run on a polyacrylamide gel and reacted with MIR98 and GAM25 precursor probes. Capped transcripts were prepared for in-vitro RNA cleavage assays with T7 RNA polymerase including a m7G(5′)ppp(5′)G-capping reaction the Message Machine kit (Ambion). Purified PCR products were used as template for the reaction. These were amplified for each assay with specific primers containing a T7 promoter at the 5″ end and a T3 RNA polymerase promoter at the 3″ end. Capped RNA transcripts were incubated at 30C in supplemented, dialysis concentrated, Hela S100 cytoplasmic extract (4C Biotech, Seneffe, Belgium). The Hela S100 was supplemented by dialysis to a final concentration of 2 0 mM Hepes, 100 mM KCl, 2.5 mM MgCl2, 0.5 mM DTT, 20% glycerol and protease inhibitor cocktail tablets (Complete mini Roche Molecular Biochemicals). After addition of all components, final concentrations were 100 mM capped target RNA, 2 mM ATP, 0.2 mM GTP, 500 U/ml RNasin, 25 g/ml creatine kinase, 25 mM creatine phosphate, 2.5 mM DTT and 50% S100 extract. Proteinase K, used to enhance Dicer activity (Zhang et al., EMBOJ. 21, 5875-5885 (2002)) was dissolved in 50 mM Tris-HCl pH 8, 5 mM CaCl2, and 50% glycerol, was added to a final concentration of 0.6 mg/ml. Cleavage reactions were stopped by the addition of 8 volumes of proteinase K buffer (200 Mm Tris-Hcl, pH 7.5, 25 mM EDTA, 300 mM NaCl, and 2% SDS) and incubated at 65C for 15 min at different time points (0, 0.5, 1, 4, 24h) and subjected to phenol/chloroform extraction. Pellets were dissolved in water and kept frozen. Samples were analyzed on a segmented half 6%, half 13% polyacrylamide 1XTBE-7M Urea gel.

[0307] The Northern blot results of these experiments demonstrated an accumulation of a ˜22 bp segment which reacted with the MIR98 precursor probe, and of a ˜24 bp segment which reacted with the GAM25 precursor probe, over time (lanes 5-8). Absence of these segments when incubated with EDTA (lane 9), which is known to inhibit Dicer enzyme (Zhang et al., 2002), supports the notion that the processing of MIR98 and GAM25 precursors into their ‘diced’ segments is mediated by Dicer enzyme, found in Hela lysate. The molecular sizes of EST72223, MIR-98 and GAM25 and their corresponding precursors are indicated by arrows.

[0308] FIG. 24D present Northern blot results of same above experiments with GAM25 probe (24 nt). The results clearly demonstrated the accumulation of mature GAM25 oligonucleotide after 24 h.

[0309] To validate the identity of the band shown by the lower arrow in FIGS. 24C and 24D, a RNA band parallel to a marker of 24 base was excised from the gel and cloned as in Elbashir et al (2001) and sequenced. 90 clones corresponded to the sequence of mature GAM25 oligonucleotide, three corresponded to GAM25* (the opposite arm of the hairpin with a 1-3 nucleotide 3″ overhang) and two to the hairpin-loop.

[0310] GAM25 was also validated endogenously by sequencing from both sides from a HeLa YM100 total-RNA “ligation” libraries, utilizing hemispecific primers as described in FIG. 22.

[0311] Taken together, these results validate the presence and processing of a novel MIR-like oligonucleotide, GAM25, which was predicted bioinformatically. The processing of this novel GAM oligonucleotide product, by Hela lysate from EST72223, through its precursor, to its final form was similar to that observed for known miRNA oligonucleotide, MIR98.

[0312] Transcript products were 705 nt (EST72223), 102 nt (MIR98 precursor), 125 nt (GAM25 precursor) long. EST72223 was PCR amplified with T7-EST 72223 forward primer:
[0313] 5 ″-TAATACGACTCACTATAGGCCCTTATTAGAGGATTCTGC T-3″ and T3-EST72223 reverse primer:″-AATTAACCCTCACTAAAGGTTITITIITCCTGAGA CAGAGT-3″.MIR98 was PCR amplified using EST72223 as a template with T7MIR98 forward primer:
[0314] 5 -″TAATACGACTCACTATAGGGTGAGGTAGTAAGTTGTATT GTT-3″ and T3MIR98 reverse primer: 5 ″-AATTAACCCTCACTAAAGGGAAAGTAGTAAGTTGTATAG TT-3″.GAM25 was PCR amplified using EST72223 as a template with GAM25 forward primer:
[0315] 5″-GAGGCAGGAGAATTGCTTGA-3″ and T3-EST72223 reverse primer: 5 ″-AATTAACCCTCACTAAAGGCCTGAGACAGAGTCT TGCTC-3″.

[0316] It is appreciated that the data presented in FIGS. 24A, 24B, 24C and 24D when taken together validate the function of the bioinformatic oligonucleotide detection engine 100 of FIG. 9. FIG. 24A shows a novel GAM oligonucleotide bioinformatically detected by the BIOINFORMATIC OLIGONUCLEOTIDE DETECTION ENGINE 100, and FIGS. 24C and 24D show laboratory confirmation of the expression of this novel oligonucleotide. This is in accord with the engine training and validation methodology described hereinabove with reference to FIG. 10.

### DETAILED DESCRIPTION OF LARGE TABLES

[0317] Table 1 comprises data relating the SEQ ID NO of GAM RNA oligonucleotides of the present invention to their corresponding GAM NAME, and contains the following fields: GAM SEQ-ID: GAM SEQ ID NO, as in the Sequence Listing; GAM NAME: Rosetta Genomics Ltd. nomenclature (see below); GAM RNA SEQUENCE: Sequence (5′ to 3′) of the mature, ‘diced’ GAM RNA; GAM POS: Dicer cut location (see below); and

[0318] Table 2 comprises detailed textual description according to the description of FIG. 8 of each of a plurality of novel GAM oligonucleotide of the present invention, and contains the following fields: GAM NAME: Rosetta Genomics Ltd. nomenclature (see below);PRECUR SEQ-ID:GAM precursor Seq-ID, as in the Sequence Listing; PRECURSOR SEQUENCE: Sequence (5′ to 3′) of the GAM precursor; GAM DESCRIPTION: Detailed description of GAM oligonucleotide with reference to FIG. 8; and

[0319] Table 3 comprises data relating to the source and location of novel GAM oligonucleotides of the present invention, and contains the following fields: GAM NAME: Rosetta Genomics Ltd. nomenclature (see below); PRECUR SEQ-ID: GAM precursor SEQ ID NO, as in the Sequence Listing; ORGANISM: Abbreviated (hsa=Homo sapiens); CHR: Chromosome encoding the GAM oligonucleotide; STRAND: Orientation on the chromosome, ‘+’ for the plus strand,‘−’ for the minus strand; CHR-START OFFSET Start offset of GAM precursor sequence on the chromosome; CHR-END OFFSET: End offset of GAM precursor sequence on the chromosome; SOURCE-REF-ID: Accession number of source sequence; and

[0320] Table 4 comprises data relating to GAM precursors of novel GAM oligonucleotides of the present invention, and contains the following fields: GAM NAME: Rosetta Genomics Ltd. nomenclature (see below); PRECUR SEQ-ID: GAM precursor Seq-ID, as in the Sequence Listing; PRECURSOR-SEQUENCE: Sequence (5′ to 3′) of the GAM precursor; GAM FOLDED PRECURSOR RNA: Schematic representation of the GAM folded precursor, beginning 5′ end (beginning of upper row) to 3′ end (beginning of lower row), where the hairpin loop is positioned at the right part of the draw; and

[0321] Table 5 comprises data relating to GAM oligonucleotides of the present invention, and contains the following fields:

[0322] GAM NAME: Rosetta Genomics Ltd. nomenclature (see below); GAM RNA SEQUENCE: Sequence (5′ to 3′) of the mature, ‘diced’ GAM RNA; PRECUR SEQ-ID : GAM precursor Seq-ID, as in the Sequence Listing; SOURCE_REF_ID: accession number of the source sequence; GAM POS: Dicer cut location (see below); and

[0323] Table 6 comprises data relating SEQ ID NO of the GAM target gene binding site sequence to TARGET gene name and target binding site sequence, and contains the following fields: TARGET BINDING SITE SEQ-ID: Target binding site SEQ ID NO, as in the Sequence Listing; TARGET: GAM target gene name; TARGET BINDING SITE SEQUENCE: Nucleotide sequence (5′ to 3′) of the target binding site; and

[0324] Table 7 comprises data relating to target genes and binding sites of GAM oligonucleotides of the present invention, and contains the following fields: GAM NAME: Rosetta Genomics Ltd. nomenclature (see below); GAM RNA SEQUENCE: Sequence (5′ to 3′) of the mature, ‘diced’ GAM RNA; TARGET: GAM target gene name; TARGET REF-ID: Target accession number (GenBank); UTR: Untranslated region of binding site/s (3′ or 5′); TARGET BS-SEQ: Nucleotide sequence (5′ to 3′) of the target binding site; BINDING-SITE-DRAW: Schematic representation of the binding site, upper row represent 5′ to 3′ sequence of the GAM RNA, lower row represent 3′ to 5′ sequence of the target binding site; GAM POS: Dicer cut location (see below); and

[0325] Table 8 comprises data relating to functions and utilities of novel GAM oligonucleotides of the present invention, and contains the following fields: GAM NAME: Rosetta Genomics Ltd. nomenclature (see below);TARGET: GAM target gene name; GAM RNA SEQUENCE: Sequence (5′ to 3′) of the mature, ‘diced’ GAM RNA; GAM FUNCTION: Description of the GAM functions and utilities; GAM POS: Dicer cut location (see below);TAR DIS: Target Disease Relation Group (see below); and

[0326] Table 9 comprises data of GAM target gene function references—Bibliography and contains the following fields: GAM NAME: Rosetta Genomics Ltd. nomenclature (see below); GAM RNA SEQUENCE: Sequence (5′ to 3′) of the mature, ‘diced’ GAM RNA; TARGET: GAM target gene name; REFERENCES: list of references related to the GAM target gene; GAM POS: Dicer cut location (see below); and

[0327] Table 10 comprises data relating to novel GR (Genomic Record) polynucleotides of the present invention, and contains the following fields: GR NAME: Rosetta Genomics Ltd. nomenclature (see below); GR DESCRIPTION: Detailed description of a GR polynucleotide cluster, with reference to FIG. 16; and

[0328] Table 11 comprises data relating to Alzheimers disease that GAM oligonucleotides are predicted to regulate the disease-associated genes. Each row is referred to a specific disease, and list the GAM target genes related to the disease. The first row is a summary of ALL target genes associated in Alzheimer disease containing in the present invention. The second row is a subset of the first row and contains all GAM target genes found to bind to at least one validated GAM oligonucleotide. The table contains the following fields: ROW#: index of the row number; DISEASE NAME: name of the disease; TARGET GENES ASSOCIATED WITH ALZHEIMER: list of GAM target genes that are associated with the specified disease; and

[0329] The following conventions and abbreviations are used in the tables: The nucleotide ‘U’ is represented as ‘T’ in the tables, and

[0330] GAM NAME or GR NAME are names for nucleotide sequences of the present invention given by RosettaGenomics Ltd. nomenclature method. All GAMs/GRs are designated by GAMx/GRx where x is a unique ID.

[0331] SOURCE REF-ID: The accession number of expressed sequences on which novel oligonucleotides were detected.

[0332] The sequences are taken from the following published databases: (1) TIGR—“Tentative Human Consensus” (THC) (2) EST database—UNIGENE, NCBI.

[0333] GAM POS is a position of the GAM RNA on the GAM PRECURSOR RNA sequence. This position is the Dicer cut location, ‘A’ indicates a probable Dicer cut location, ‘B’ indicates an alternative Dicer cut location.

[0334] TAR DIS (Target Disease Relation Group) ‘A’ indicates if the target gene is known to have a specific causative relation to Alzheimers disease, based on the OMIM database (Hamosh et al, 2002). It is appreciated that this is a partial classification emphasizing genes which are associated with “single gene” diseases etc. All GAM oligonucleotides of the present invention ARE associated with Alzheimers disease, although not all are necessary in ‘A’ status.

[0335] All genomic sequences of the present invention as well as their chromosomal location and strand orientation are derived from sequences records of NCBI, Build33 database (April, 2003).

[0336] It is appreciated by persons skilled in the art that the present invention is not limited by what has been particularly shown and described hereinabove. Rather the scope of the present invention includes both combinations and subcombinations of the various features described hereinabove as well as variations and modifications which would occur to persons skilled in the art upon reading the specifications and which are not in the prior art.

1 A bioinformatically detectable isolated oligonucleotide which is endogenously processed from a hairpin-shaped precursor, and anneals to a portion of a mrna transcript of a target gene, wherein binding of said oligonucleotide to said mrna transcript represses expression of said target gene, and wherein said oligonucleotide has at least 80% sequence identity with a nucleotide sequence selected from the group consisting of SEQ ID NOs: 1-2686.

2 A bioinformatically detectable isolated oligonucleotide which is endogenously processed from a hairpin-shaped precursor, and anneals to a portion of a mRNA transcript of a target gene selected from the group consisting of genes shown in Table 11, Row 1, wherein binding of said oligonucleotide to said mRNA transcript represses expression of said target gene, and wherein said oligonucleotide has at least 80% sequence identity with a nucleotide sequence selected from the group consisting of SEQ ID NOs: 1-2686.

3 A bioinformatically detectable isolated oligonucleotide having a nucleotide sequence selected from the group consisting of SEQ ID NOs: 1-2686.

4 A bioinformatically detectable first oligonucleotide which is a portion of a mRNA transcript of a target gene, and anneals to a second oligonucleotide that is endogenously processed from a hairpin precursor, wherein binding of said first oligonucleotide to said second oligonucleotide represses expression of said target gene, and wherein nucleotide sequence of said second nucleotide is selected from the group consisting of SEQ ID NOs: 1-2686.

5 A bioinformatically detectable first oligonucleotide which is a portion of a mRNA transcript of a target gene selected from the group consisting of genes shown in Table 11 row 1, and anneals to a second oligonucleotide that is endogenously processed from a hairpin precursor, wherein binding of said first oligonucleotide to said second oligonucleotide represses expression of said target gene, and wherein nucleotide sequence of said second nucleotide is selected from the group consisting of SEQ ID NOs: 1-2686.

6 A bioinformatically detectable oligonucleotide having a nucleotide sequence selected from the group consisting of SEQ ID NOs: 1-2686.

7 A bioinformatically detectable isolated oligonucleotide which is endogenously processed from a hairpin-shaped precursor, and anneals to a portion of a mRNA transcript of a target gene associated with Alzheimers disease, wherein binding of said oligonucleotide to said mRNA transcript represses expression of said target gene.

8 A bioinformatically detectable isolated oligonucleotide which is endogenously processed from a hairpin-shaped precursor, and anneals to a portion of a mRNA transcript of a target gene that is differentially expressed in a tissue affected by Alzheimers disease relative an unaffected tissue, wherein binding of said oligonucleotide to said mRNA transcript represses expression of said target gene.

9 A bioinformatically detectable isolated oligonucleotide which is endogenously processed from a hairpin-shaped precursor, and anneals to a portion of a mRNA transcript of a target gene, the expression of which target gene correlates with Alzheimers disease or susceptibility thereto, wherein binding of said oligonucleotide to said mRNA transcript represses expression of said target gene.

10 A bioinformatically detectable isolated oligonucleotide which is endogenously processed from a hairpin-shaped precursor, and anneals to a portion of a mRNA transcript of a target gene responsible for the formation of Alzheimers disease, wherein binding of said oligonucleotide to said mRNA transcript represses expression of said target gene.

11 A bioinformatically detectable isolated oligonucleotide which anneals to a portion of a mRNA transcript of a target gene selected from the group consisting of:

12 A bioinformatically detectable isolated oligonucleotide which is endogenously processed from a hairpin-shaped precursor, and anneals to a portion of a mRNA transcript of a target gene selected from the group consisting of:

13 A bioinformatically detectable isolated oligonucleotide which anneals to a portion of a mRNA transcript of a target gene associated with Alzheimers disease, which target gene is selected from the group consisting of:

14 A bioinformatically detectable isolated oligonucleotide which anneals to a portion of a mRNA transcript of a target gene selected from the group consisting of:

15 A bioinformatically detectable isolated oligonucleotide which comprises from about 19 to about 22 nucleotides, which nucleotides are partially complementary to a target gene selected form the group consisting of:

16 A bioinformatically detectable first oligonucleotide which is a portion of a mRNA transcript of a target gene selected from the group consisting of:

17 A bioinformatically detectable first oligonucleotide which is a portion of a mRNA transcript of a target gene selected from the group consisting of: ACE, ACT, ADAM10, ADAM17, ADAMTS5, APBA1, APBA2, APBB2, APLP1, APLP2, APOC1, APP, APPBP2, ARHA, AVP, BACE, BACE2, BCHE, BLMH, CASP3, CAV1, CAV2, CHAT, CNTF, CRH, CRYAB, CTNND2, CTSB, CTSK, DHCR24, DLST, DSCR1, FHL2, FLNB, FOS, GFAP, GLUL, GSK3B, GYPA, HADH2, HD, HTR2A, HTR2C, IAPP, IGF1, IL1A, LRP1, MAPK10, MAPT, MME, MPO, MT3, MTNR1A, NCKAP1, NCSTN, NGB, OGDH, OLR1, PLAU, PRND, PSEN1, PSEN2, RAGE, S100B, SERPINA3, SLC17A7, SLC6A4, SNCA, SNCAIP, TGFB1, TNF, TNFRSF5, TNFRSF6, TRPM2 and UBB, and anneals to a second oligonucleotide that is endogenously processed from a hairpin precursor, wherein binding of said first oligonucleotide to said second oligonucleotide represses expression of said target gene, and wherein nucleotide sequence of said second nucleotide is selected from the group consisting of SEQ ID NOs: 1-36 and 37-2686.

18 A bioinformatically detectable isolated oligonucleotide which anneals to a portion of a mRNA transcript of APP gene, wherein binding of said oligonucleotide to said mRNA transcript represses expression of APP gene.

19 A bioinformatically detectable isolated oligonucleotide which is endogenously processed from a hairpin-shaped precursor, and anneals to a portion of a mRNA transcript of APP gene, wherein binding of said oligonucleotide to said mRNA transcript represses expression of APP gene.

20 A bioinformatically detectable isolated oligonucleotide which anneals to a portion of a mRNA transcript of APP gene, wherein binding of said oligonucleotide to said mRNA transcript represses expression of APP gene, and wherein said oligonucleotide has at least 80% sequence identity with a nucleotide sequence selected from the group consisting of: (a) a sequence selected from the group consisting of SEQ ID NOs: 2,31 and 416-427; and (b) the complement of a sequence selected from the group consisting of SEQ ID NOs: 3107, 3113 and 3106-3121.

21 A bioinformatically detectable isolated oligonucleotide which anneals to a portion of a mRNA transcript of APP gene, wherein binding of said oligonucleotide to said mRNA transcript represses expression of APP gene, and wherein said oligonucleotide has at least 80% sequence identity with a nucleotide sequence selected from the group consisting of SEQ ID NOs: 2, 31 and 416-427.

22 A bioinformatically detectable isolated oligonucleotide which is endogenously processed from a hairpin-shaped precursor, and anneals to a complementary portion of a mRNA transcript of APP gene, wherein binding of said oligonucleotide to said mRNA transcript represses expression of APP gene, and wherein said oligonucleotide has at least 80% sequence identity with a nucleotide sequence selected from the group consisting of SEQ ID NOs: 2, 31 and 416-427.

23 A bioinformatically detectable isolated oligonucleotide which comprises from about 19 to about 22 nucleotides, which nucleotides anneal to a portion of a mRNA transcript of APP gene; and wherein said oligonucleotide is endogenously processed from a hairpin-form precursor, and comprises at least 19 contiguous nucleotides from a sequence selected from the group consisting of SEQ ID NOs: 2, 31 and 416-427.

24 A bioinformatically detectable first oligonucleotide which is a portion of a mRNA transcript of APP gene, and anneals to a second oligonucleotide that is endogenously processed from a hairpin precursor, wherein binding of said first oligonucleotide to said second oligonucleotide represses expression of said target gene.

25 A bioinformatically detectable first oligonucleotide which is a portion of a mRNA transcript of APP gene, and anneals to a second oligonucleotide that is endogenously processed from a hairpin precursor, wherein binding of said first oligonucleotide to said second oligonucleotide represses expression of said target gene, and wherein nucleotide sequence of said second nucleotide is selected from the group consisting of SEQ ID NOs: 2, 31 and 416-427.

26 A bioinformatically detectable isolated polynucleotide which is endogenously processed into a plurality of hairpin shaped precursor oligonucleotides, each of which is endogenously processed into a respective oligonucleotide, which in turn anneals to a portion of a mRNA transcript of a target gene, wherein binding of said oligonucleotide to said mRNA transcript represses expression of said target gene.

27 A bioinformatically detectable isolated oligonucleotide which is endogenously processed from a hairpin-shaped precursor, and anneals to a portion of a mRNA transcript of a target gene, wherein binding of said oligonucleotide to said mRNA transcript represses expression of said target gene, and wherein said target gene does not encode a protein.

28 A bioinformatically detectable isolated oligonucleotide which is endogenously processed from a hairpin-shaped precursor, and anneals to a portion of a mRNA transcript of a target gene, wherein binding of said oligonucleotide to said mRNA transcript represses expression of said target gene, and wherein a function of said oligonucleotide comprises modulation of cell type.

29 A bioinformatically detectable isolated oligonucleotide which is endogenously processed from a hairpin-shaped precursor, and anneals to a portion of a mRNA transcript of a target gene, wherein binding of said oligonucleotide to said mRNA transcript represses expression of said target gene, and wherein said oligonucleotide is maternally transferred by a cell to at least one daughter cell of said cell, and a function of said oligonucleotide comprises modulation of cell type of said daughter cell.

30 A method for bioinformatic detection of microRNA oligonucleotides, the method comprising: bioinformatically detecting a hairpin shaped precursor oligonucleotide; bioinformatically detecting an oligonucleotide which is endogenously processed from said hairpin shaped precursor oligonucleotide; and bioinformatically detecting a target gene of said oligonucleotide wherein said oligonucleotide anneals to at least one portion of a mRNA transcript of said target gene, and wherein said binding represses expression of said target gene, and said target gene is associated with a disease.

The application's sequence listing, which the Patent Office published only in electronic form, follows.

SEQUENCE LISTING (7351 sequences)

SEQ ID NO: 1 - RNA, 22 nt, Homo Sapiens
aaaaugcuuacaggcaguagcc

SEQ ID NO: 2 - RNA, 22 nt, Homo Sapiens
aaagugcucauagugcagguag

SEQ ID NO: 3 - RNA, 22 nt, Homo Sapiens
aaggcacuugcccagagcugca

SEQ ID NO: 4 - RNA, 23 nt, Homo Sapiens
aaucaucauuauuuugaaguuua

SEQ ID NO: 5 - RNA, 22 nt, Homo Sapiens
aauugcuugaacccaggaagug

SEQ ID NO: 6 - RNA, 22 nt, Homo Sapiens
acaugaucuccucacucuagga

SEQ ID NO: 7 - RNA, 22 nt, Homo Sapiens
acugcacuccagccugggcaac

SEQ ID NO: 8 - RNA, 22 nt, Homo Sapiens
agggcuguggguguggcugugc

SEQ ID NO: 9 - RNA, 22 nt, Homo Sapiens
aguagacaguggcaacauaguc

SEQ ID NO: 10 - RNA, 22 nt, Homo Sapiens
agugggauggagucagcagaag

SEQ ID NO: 11 - RNA, 22 nt, Homo Sapiens
aucacagaggcuuaagugcuga

SEQ ID NO: 12 - RNA, 22 nt, Homo Sapiens
aucacauugccagugauuaccc

SEQ ID NO: 13 - RNA, 22 nt, Homo Sapiens
cacugcacuccagccugggcaa

SEQ ID NO: 14 - RNA, 22 nt, Homo Sapiens
cauugcacuccagccugggcaa

SEQ ID NO: 15 - RNA, 22 nt, Homo Sapiens
cuagacugaagcuccuugagga

SEQ ID NO: 16 - RNA, 22 nt, Homo Sapiens
cuagccuguuuguccucacccc

SEQ ID NO: 17 - RNA, 22 nt, Homo Sapiens
gaaggcaguagguuguauaguu

SEQ ID NO: 18 - RNA, 22 nt, Homo Sapiens
gaaguuugaagccuguuguuca

SEQ ID NO: 19 - RNA, 22 nt, Homo Sapiens
guguuccaggaagucgucuuga

SEQ ID NO: 20 - RNA, 17 nt, Homo Sapiens
uaaggcauuuuuauggu

SEQ ID NO: 21 - RNA, 22 nt, Homo Sapiens
uaaggugcaucuagugcaguua

SEQ ID NO: 22 - RNA, 22 nt, Homo Sapiens
uaauacugccggguaaugaugg

SEQ ID NO: 23 - RNA, 22 nt, Homo Sapiens
uagcagcacauaaugguuugaa

SEQ ID NO: 24 - RNA, 22 nt, Homo Sapiens
uagguaguuuccuguuguuggg

SEQ ID NO: 25 - RNA, 22 nt, Homo Sapiens
ucaagcucauuccucuaaccuc

SEQ ID NO: 26 - RNA, 22 nt, Homo Sapiens
ucacagugaaccggucucuuuc

SEQ ID NO: 27 - RNA, 22 nt, Homo Sapiens
ucacugcaaccucugcugccug

SEQ ID NO: 28 - RNA, 22 nt, Homo Sapiens
ucggcagggaacaggaaguagg

SEQ ID NO: 29 - RNA, 22 nt, Homo Sapiens
ucuaagagaaaggaaguucaga

SEQ ID NO: 30 - RNA, 22 nt, Homo Sapiens
ucuugugaaaucuguggacccu

SEQ ID NO: 31 - RNA, 20 nt, Homo Sapiens
ugaggugggaucccgaggcc

SEQ ID NO: 32 - RNA, 17 nt, Homo Sapiens
uggcuagguaagggaag

SEQ ID NO: 33 - RNA, 22 nt, Homo Sapiens
uucagagugguuaagaucaugg

SEQ ID NO: 34 - RNA, 22 nt, Homo Sapiens
uuccucugccacgucuuucccu

SEQ ID NO: 35 - RNA, 22 nt, Homo Sapiens
uuggaguaauucaguauagguu

SEQ ID NO: 36 - RNA, 22 nt, Homo Sapiens
uuuccacagcggccaauucuuc

SEQ ID NO: 37 - RNA, 22 nt, Homo Sapiens
acgccgcugugggaaagcacuu

SEQ ID NO: 38 - RNA, 22 nt, Homo Sapiens
agaagguuggggcuggaggucu

SEQ ID NO: 39 - RNA, 22 nt, Homo Sapiens
ggccaggacucuugcagaacug

SEQ ID NO: 40 - RNA, 22 nt, Homo Sapiens
uggagcagaaaggcaggagucc

SEQ ID NO: 41 - RNA, 22 nt, Homo Sapiens
uggcaagugggcacuuuucagg

SEQ ID NO: 42 - RNA, 22 nt, Homo Sapiens
uggcacagaucagcagaacagg

SEQ ID NO: 43 - RNA, 22 nt, Homo Sapiens
uggaggcaggugcagauggagg

SEQ ID NO: 44 - RNA, 22 nt, Homo Sapiens
ugugcugguugcccccgagggg

SEQ ID NO: 45 - RNA, 22 nt, Homo Sapiens
ucccugagacucuuuaacuucu

SEQ ID NO: 46 - RNA, 22 nt, Homo Sapiens
ugaggcaggaguuggcaagagg

SEQ ID NO: 47 - RNA, 22 nt, Homo Sapiens
ugaggucauguucugucagguu

SEQ ID NO: 48 - RNA, 22 nt, Homo Sapiens
ggccugaggucagcaguagagg

SEQ ID NO: 49 - RNA, 22 nt, Homo Sapiens
ggcacugagaagcaaacaggau

SEQ ID NO: 50 - RNA, 22 nt, Homo Sapiens
gcccaggagucugaggcuggag

SEQ ID NO: 51 - RNA, 22 nt, Homo Sapiens
gccuggaugugaccacccucac

SEQ ID NO: 52 - RNA, 22 nt, Homo Sapiens
gcugcuccugcucucccucucc

SEQ ID NO: 53 - RNA, 22 nt, Homo Sapiens
gcuucuccuguccccucccuac

SEQ ID NO: 54 - RNA, 22 nt, Homo Sapiens
gguggguuuccuuaauggcauc

SEQ ID NO: 55 - RNA, 22 nt, Homo Sapiens
guccagugcucacugccgacau

SEQ ID NO: 56 - RNA, 22 nt, Homo Sapiens
guugggugugagggggguccca

SEQ ID NO: 57 - RNA, 22 nt, Homo Sapiens
aaauccuggggaucuggaggga

SEQ ID NO: 58 - RNA, 22 nt, Homo Sapiens
aggcagguggguguaugggucu

SEQ ID NO: 59 - RNA, 22 nt, Homo Sapiens
aggcaguguuguuccugauugc

SEQ ID NO: 60 - RNA, 22 nt, Homo Sapiens
aguggcccuggcccuggggcau

SEQ ID NO: 61 - RNA, 22 nt, Homo Sapiens
augaccugcagucagggcccag

SEQ ID NO: 62 - RNA, 22 nt, Homo Sapiens
ccagccugagguuccuggaggg

SEQ ID NO: 63 - RNA, 22 nt, Homo Sapiens
cugaggucaggaguucgagacc

SEQ ID NO: 64 - RNA, 22 nt, Homo Sapiens
cuggcucccucucuucucuccc

SEQ ID NO: 65 - RNA, 22 nt, Homo Sapiens
cuggcucccaggaggccucucu

SEQ ID NO: 66 - RNA, 22 nt, Homo Sapiens
cuuuggccacggggauaugaau

SEQ ID NO: 67 - RNA, 22 nt, Homo Sapiens
cuuuuugggguuuggggcuugg

SEQ ID NO: 68 - RNA, 22 nt, Homo Sapiens
uuccugguggaggcauucggag

SEQ ID NO: 69 - RNA, 22 nt, Homo Sapiens
uuguugcggguggggagaggau

SEQ ID NO: 70 - RNA, 22 nt, Homo Sapiens
uugucagaggcugguagggugu

SEQ ID NO: 71 - RNA, 22 nt, Homo Sapiens
uuugaaguggguccucgaaaug

SEQ ID NO: 72 - RNA, 22 nt, Homo Sapiens
uugcccaggcuggagugcagug

SEQ ID NO: 73 - RNA, 22 nt, Homo Sapiens
uugccuaggcuggagugcagug

SEQ ID NO: 74 - RNA, 22 nt, Homo Sapiens
uugccuaggccggagugcagug

SEQ ID NO: 75 - RNA, 22 nt, Homo Sapiens
uugcucaggcuggagugcagug

SEQ ID NO: 76 - RNA, 22 nt, Homo Sapiens
uucuggugaauucaggauggua

SEQ ID NO: 77 - RNA, 22 nt, Homo Sapiens
uugagcacaguuugaggagugu

SEQ ID NO: 78 - RNA, 22 nt, Homo Sapiens
uugcaaggaaggggaggaggcu

SEQ ID NO: 79 - RNA, 22 nt, Homo Sapiens
uugaugaaugggugcuccagga

SEQ ID NO: 80 - RNA, 22 nt, Homo Sapiens
uuuucugggcucccuuuucugc

SEQ ID NO: 81 - RNA, 22 nt, Homo Sapiens
gaacagcuccagucuacagccc

SEQ ID NO: 82 - RNA, 22 nt, Homo Sapiens
gacaugauguagcagaugaugg

SEQ ID NO: 83 - RNA, 22 nt, Homo Sapiens
gagcagguuuggaauggcucca

SEQ ID NO: 84 - RNA, 22 nt, Homo Sapiens
gaggucacuguuggaugucaga

SEQ ID NO: 85 - RNA, 22 nt, Homo Sapiens
gagguuugagccuucuccugcu

SEQ ID NO: 86 - RNA, 22 nt, Homo Sapiens
gagugagugugaucuuggcuca

SEQ ID NO: 87 - RNA, 22 nt, Homo Sapiens
cugugcccagccagggcugugu

SEQ ID NO: 88 - RNA, 22 nt, Homo Sapiens
cugcauggagguggucuaugag

SEQ ID NO: 89 - RNA, 22 nt, Homo Sapiens
cucacugcaaccuccgccuccc

SEQ ID NO: 90 - RNA, 22 nt, Homo Sapiens
cuccuaggcuggagugcagugg

SEQ ID NO: 91 - RNA, 22 nt, Homo Sapiens
cccaggcuggagugcaguggug

SEQ ID NO: 92 - RNA, 22 nt, Homo Sapiens
cccaggagguggagguuacagu

SEQ ID NO: 93 - RNA, 22 nt, Homo Sapiens
cgcuauguuggccaggcugguc

SEQ ID NO: 94 - RNA, 22 nt, Homo Sapiens
auugcuugagcccaggaguuca

SEQ ID NO: 95 - RNA, 22 nt, Homo Sapiens
cacccaggcuggagugcagugg

SEQ ID NO: 96 - RNA, 22 nt, Homo Sapiens
cagcaccaucagaugacuguau

SEQ ID NO: 97 - RNA, 22 nt, Homo Sapiens
agugguuucagggacuucugua

SEQ ID NO: 98 - RNA, 22 nt, Homo Sapiens
agguggcacugugugggguggg

SEQ ID NO: 99 - RNA, 22 nt, Homo Sapiens
agugauuuuccugccucagccu

SEQ ID NO: 100 - RNA, 22 nt, Homo Sapiens
aggcaguguuguuccugauugc

SEQ ID NO: 101 - RNA, 22 nt, Homo Sapiens
aggugagaaaacugaggcucag

SEQ ID NO: 102 - RNA, 22 nt, Homo Sapiens
aggcacugugcaggaugauggg

SEQ ID NO: 103 - RNA, 22 nt, Homo Sapiens
agacuggccucaagcucccaga

SEQ ID NO: 104 - RNA, 22 nt, Homo Sapiens
agaggcagagguuacaguagug

SEQ ID NO: 105 - RNA, 22 nt, Homo Sapiens
agcaccacaacagggacugggc

SEQ ID NO: 106 - RNA, 22 nt, Homo Sapiens
agcagagccaccaaauuuagug

SEQ ID NO: 107 - RNA, 22 nt, Homo Sapiens
aaauccagaaucuagacugaau

SEQ ID NO: 108 - RNA, 22 nt, Homo Sapiens
aagguggugucauguuuugggg

SEQ ID NO: 109 - RNA, 22 nt, Homo Sapiens
acugcagcuucagggacuugug

SEQ ID NO: 110 - RNA, 22 nt, Homo Sapiens
guuguguggaagaugcuuugcc

SEQ ID NO: 111 - RNA, 22 nt, Homo Sapiens
gugugggcagggccgugcuccc

SEQ ID NO: 112 - RNA, 22 nt, Homo Sapiens
gugaagaaguugcuucauccuu

SEQ ID NO: 113 - RNA, 22 nt, Homo Sapiens
gugcaucaggaucugaccagau

SEQ ID NO: 114 - RNA, 22 nt, Homo Sapiens
uaaugcucagcuggaccagugu

SEQ ID NO: 115 - RNA, 22 nt, Homo Sapiens
uagacugaggcuuccugcaggg

SEQ ID NO: 116 - RNA, 22 nt, Homo Sapiens
uagugcaauggcgcgaucucgg

SEQ ID NO: 117 - RNA, 22 nt, Homo Sapiens
ucaagcaauucucgugccucag

SEQ ID NO: 118 - RNA, 22 nt, Homo Sapiens
ucacagugauggguucaggaau

SEQ ID NO: 119 - RNA, 22 nt, Homo Sapiens
ucacccaggcuggagugcagug

SEQ ID NO: 120 - RNA, 22 nt, Homo Sapiens
ucacugcaaccuccaccucccg

SEQ ID NO: 121 - RNA, 22 nt, Homo Sapiens
ucacugcaaccucugccuuccg

SEQ ID NO: 122 - RNA, 22 nt, Homo Sapiens
ucacugcaaccucugcuucugg

SEQ ID NO: 123 - RNA, 22 nt, Homo Sapiens
ucacugcaaccuccgccugccg

SEQ ID NO: 124 - RNA, 22 nt, Homo Sapiens
ggaggaggaggcuggugcuggu

SEQ ID NO: 125 - RNA, 22 nt, Homo Sapiens
gcaggaugguuggacugaaggg

SEQ ID NO: 126 - RNA, 22 nt, Homo Sapiens
ggcagcugugcagagugggggu

SEQ ID NO: 127 - RNA, 22 nt, Homo Sapiens
ggcaggaucauagcucacugca

SEQ ID NO: 128 - RNA, 22 nt, Homo Sapiens
ggcagugucauuagcugauugu

SEQ ID NO: 129 - RNA, 22 nt, Homo Sapiens
ggcccaggagggggagaaaggc

SEQ ID NO: 130 - RNA, 22 nt, Homo Sapiens
ggcgugaucuuggcucaccaca

SEQ ID NO: 131 - RNA, 22 nt, Homo Sapiens
gguccacaaggggagagcaggg

SEQ ID NO: 132 - RNA, 22 nt, Homo Sapiens
ugacucaguggaagauccagag

SEQ ID NO: 133 - RNA, 22 nt, Homo Sapiens
ugacuugucugguuuggcaucu

SEQ ID NO: 134 - RNA, 22 nt, Homo Sapiens
ugaguauucaccaggugcuggg

SEQ ID NO: 135 - RNA, 22 nt, Homo Sapiens
ugauccucuggcuucagccucc

SEQ ID NO: 136 - RNA, 22 nt, Homo Sapiens
uccagugauucucgagggcaga

SEQ ID NO: 137 - RNA, 22 nt, Homo Sapiens
ucagagcagugccgaagcccag

SEQ ID NO: 138 - RNA, 22 nt, Homo Sapiens
ucagucguuucucucucccagc

SEQ ID NO: 139 - RNA, 22 nt, Homo Sapiens
ucugucauuuuucucuuuccau

SEQ ID NO: 140 - RNA, 22 nt, Homo Sapiens
uguguacuugucuuaguuugcu

SEQ ID NO: 141 - RNA, 22 nt, Homo Sapiens
uguccuuuguuuugagauggag

SEQ ID NO: 142 - RNA, 22 nt, Homo Sapiens
ugucucaguguagagacccaga

SEQ ID NO: 143 - RNA, 22 nt, Homo Sapiens
ugugaaggaggaagggaggagc

SEQ ID NO: 144 - RNA, 22 nt, Homo Sapiens
uuaccauguuggccaggcuggu

SEQ ID NO: 145 - RNA, 22 nt, Homo Sapiens
uucagcauugccaguguuucca

SEQ ID NO: 146 - RNA, 22 nt, Homo Sapiens
uggagccuuguuguuuguucac

SEQ ID NO: 147 - RNA, 22 nt, Homo Sapiens
uggaguaaaaugucagguguuu

SEQ ID NO: 148 - RNA, 22 nt, Homo Sapiens
ugggcucauuuugcagugauuu

SEQ ID NO: 149 - RNA, 22 nt, Homo Sapiens
ugugaaggaggaagggaggagc

SEQ ID NO: 150 - RNA, 22 nt, Homo Sapiens
uguguuggagcagaggcagggg

SEQ ID NO: 151 - RNA, 22 nt, Homo Sapiens
ucuuccccaccuucggcuugca

SEQ ID NO: 152 - RNA, 22 nt, Homo Sapiens
ucugagugggaacucucaugac

SEQ ID NO: 153 - RNA, 22 nt, Homo Sapiens
ucccugagcccugaaggguguu

SEQ ID NO: 154 - RNA, 22 nt, Homo Sapiens
ugacuggaggaagggagguaag

SEQ ID NO: 155 - RNA, 22 nt, Homo Sapiens
uagcaccuucugaaauaacgug

SEQ ID NO: 156 - RNA, 22 nt, Homo Sapiens
guguguggaaaugcagaugacc

SEQ ID NO: 157 - RNA, 22 nt, Homo Sapiens
aguuccauggaaaacaacaaag

SEQ ID NO: 158 - RNA, 22 nt, Homo Sapiens
cuggaagacaugguagagcuga

SEQ ID NO: 159 - RNA, 22 nt, Homo Sapiens
cugggcgugugaggcggcugug

SEQ ID NO: 160 - RNA, 22 nt, Homo Sapiens
uuuguaauagcaaaauacugga

SEQ ID NO: 161 - RNA, 22 nt, Homo Sapiens
uuguugcggguggggagaggau

SEQ ID NO: 162 - RNA, 22 nt, Homo Sapiens
uugcucaggcuggagugcagug

SEQ ID NO: 163 - RNA, 22 nt, Homo Sapiens
uuuguacgucaacucagccuua

SEQ ID NO: 164 - RNA, 22 nt, Homo Sapiens
uuugcaguguucaucaguauuu

SEQ ID NO: 165 - RNA, 22 nt, Homo Sapiens
cuugcacuccacagccugggug

SEQ ID NO: 166 - RNA, 22 nt, Homo Sapiens
gaggucuguuguucagaaaaau

SEQ ID NO: 167 - RNA, 22 nt, Homo Sapiens
cagaucugggauacagcugugg

SEQ ID NO: 168 - RNA, 22 nt, Homo Sapiens
augaccaggaauugagagacug

SEQ ID NO: 169 - RNA, 22 nt, Homo Sapiens
agcaaguguugaaacagcuggu

SEQ ID NO: 170 - RNA, 22 nt, Homo Sapiens
agauggaguuugagagggaaua

SEQ ID NO: 171 - RNA, 22 nt, Homo Sapiens
uauaugucugguauucuugggg

SEQ ID NO: 172 - RNA, 22 nt, Homo Sapiens
gccuggccuuccuguguuuuac

SEQ ID NO: 173 - RNA, 22 nt, Homo Sapiens
ucugagcccaggaguuugaggc

SEQ ID NO: 174 - RNA, 22 nt, Homo Sapiens
uucaggacuguggacugggcug

SEQ ID NO: 175 - RNA, 22 nt, Homo Sapiens
uggcagguaagccaccagcauc

SEQ ID NO: 176 - RNA, 22 nt, Homo Sapiens
ugcuaggcuuauucucuuccuc

SEQ ID NO: 177 - RNA, 22 nt, Homo Sapiens
ugagggcaggugugaaaaugcu

SEQ ID NO: 178 - RNA, 22 nt, Homo Sapiens
gcugcuccugcucucccucucc

SEQ ID NO: 179 - RNA, 22 nt, Homo Sapiens
ggcaaggaagaaagcagaaguu

SEQ ID NO: 180 - RNA, 22 nt, Homo Sapiens
guuuuaggcaacauaggaagac

SEQ ID NO: 181 - RNA, 22 nt, Homo Sapiens
agagcuaggaagauacaggguu

SEQ ID NO: 182 - RNA, 22 nt, Homo Sapiens
aggaaacauccucccccuuguu

SEQ ID NO: 183 - RNA, 22 nt, Homo Sapiens
aggcugcaguguaguggcauga

SEQ ID NO: 184 - RNA, 22 nt, Homo Sapiens
auggccuuuucucuuauccugg

SEQ ID NO: 185 - RNA, 22 nt, Homo Sapiens
agguggaguuuugcuuucccau

SEQ ID NO: 186 - RNA, 22 nt, Homo Sapiens
acuggaguuuguucaagaaaua

SEQ ID NO: 187 - RNA, 22 nt, Homo Sapiens
cacugcacuccagcccggcaac

SEQ ID NO: 188 - RNA, 22 nt, Homo Sapiens
cucacugcaaccuccgccuccc

SEQ ID NO: 189 - RNA, 22 nt, Homo Sapiens
cucccuccacuucugaggacgu

SEQ ID NO: 190 - RNA, 22 nt, Homo Sapiens
uugagcaaaauaucugguuuca

SEQ ID NO: 191 - RNA, 22 nt, Homo Sapiens
uucuggugaauucaggauggua

SEQ ID NO: 192 - RNA, 22 nt, Homo Sapiens
uugcucaggcuggagugcagug

SEQ ID NO: 193 - RNA, 22 nt, Homo Sapiens
uugccuaggcuggagugcagug

SEQ ID NO: 194 - RNA, 22 nt, Homo Sapiens
uugcccaggcuagagugcagug

SEQ ID NO: 195 - RNA, 22 nt, Homo Sapiens
uugcccaggcuggagugcagug

SEQ ID NO: 196 - RNA, 22 nt, Homo Sapiens
uuugcacacuuuccaaguugcc

SEQ ID NO: 197 - RNA, 22 nt, Homo Sapiens
cuccuaggcuggagugcagugg

SEQ ID NO: 198 - RNA, 22 nt, Homo Sapiens
cugggauuacaggugugaacca

SEQ ID NO: 199 - RNA, 22 nt, Homo Sapiens
gaagagcugugugcugugaugu

SEQ ID NO: 200 - RNA, 22 nt, Homo Sapiens
cacugcaagcuccaccucccgg

SEQ ID NO: 201 - RNA, 22 nt, Homo Sapiens
cacugcaaccuccaccuccugg

SEQ ID NO: 202 - RNA, 22 nt, Homo Sapiens
cacccaggcuggagugcagugg

SEQ ID NO: 203 - RNA, 22 nt, Homo Sapiens
caaagugcugagauuacaggca

SEQ ID NO: 204 - RNA, 22 nt, Homo Sapiens
cacugggauuacagaugugagc

SEQ ID NO: 205 - RNA, 22 nt, Homo Sapiens
cgcuauguuggccaggcugguc

SEQ ID NO: 206 - RNA, 22 nt, Homo Sapiens
ccuggagugacagguguagccu

SEQ ID NO: 207 - RNA, 22 nt, Homo Sapiens
cuaauuguuccugcagguagua

SEQ ID NO: 208 - RNA, 22 nt, Homo Sapiens
cccaggcuggagugcaguggug

SEQ ID NO: 209 - RNA, 22 nt, Homo Sapiens
ccaaagugcuaggauuacagcc

SEQ ID NO: 210 - RNA, 22 nt, Homo Sapiens
ccaaagugcugggauuacaggc

SEQ ID NO: 211 - RNA, 22 nt, Homo Sapiens
ccaaagugcuggcguuacaggu

SEQ ID NO: 212 - RNA, 22 nt, Homo Sapiens
acaguguuacccaggcuggucu

SEQ ID NO: 213 - RNA, 22 nt, Homo Sapiens
aagugcugggauuacaggccug

SEQ ID NO: 214 - RNA, 22 nt, Homo Sapiens
aagugcugguauuacaagugug

SEQ ID NO: 215 - RNA, 22 nt, Homo Sapiens
auggccuuuucucuuauccugg

SEQ ID NO: 216 - RNA, 22 nt, Homo Sapiens
augaccaggaauugagagacug

SEQ ID NO: 217 - RNA, 22 nt, Homo Sapiens
aggcugcaguguaguggcauga

SEQ ID NO: 218 - RNA, 22 nt, Homo Sapiens
agaugauguuggagucugugcu

SEQ ID NO: 219 - RNA, 22 nt, Homo Sapiens
gugcauuuguaguuaaaugugu

SEQ ID NO: 220 - RNA, 22 nt, Homo Sapiens
ucacagagacuugggccucaaa

SEQ ID NO: 221 - RNA, 22 nt, Homo Sapiens
ucacccaggcuggagugcagug

SEQ ID NO: 222 - RNA, 22 nt, Homo Sapiens
uaggaaguauuuuuuaaaaaca

SEQ ID NO: 223 - RNA, 22 nt, Homo Sapiens
uacaguaucuguaaaaacuguc

SEQ ID NO: 224 - RNA, 22 nt, Homo Sapiens
ggcuggagaguaaaucaggucu

SEQ ID NO: 225 - RNA, 22 nt, Homo Sapiens
gcccaggagucugaggcuggag

SEQ ID NO: 226 - RNA, 22 nt, Homo Sapiens
gcaagugcugucauauggaaga

SEQ ID NO: 227 - RNA, 22 nt, Homo Sapiens
ugagauggugucauauugcugg

SEQ ID NO: 228 - RNA, 22 nt, Homo Sapiens
ugaguauucaccaggugcuggg

SEQ ID NO: 229 - RNA, 22 nt, Homo Sapiens
ugcaagucugugauuuuguguu

SEQ ID NO: 230 - RNA, 22 nt, Homo Sapiens
uggagugucuggaggugucucu

SEQ ID NO: 231 - RNA, 22 nt, Homo Sapiens
ugggaagaugcuggcaaggugc

SEQ ID NO: 232 - RNA, 22 nt, Homo Sapiens
uuaccauguuggccaggcuggu

SEQ ID NO: 233 - RNA, 22 nt, Homo Sapiens
uuagauauguccccuucuauaa

SEQ ID NO: 234 - RNA, 22 nt, Homo Sapiens
uguccuuuguuuugagauggag

SEQ ID NO: 235 - RNA, 22 nt, Homo Sapiens
ugugucuguggaacagaagcag

SEQ ID NO: 236 - RNA, 22 nt, Homo Sapiens
uguggcuaguuugaacugagau

SEQ ID NO: 237 - RNA, 22 nt, Homo Sapiens
ugugagagaaauggcaaguugg

SEQ ID NO: 238 - RNA, 22 nt, Homo Sapiens
uucacauguugcucaguuuugc

SEQ ID NO: 239 - RNA, 22 nt, Homo Sapiens
uggcaggauuccugggauuuca

SEQ ID NO: 240 - RNA, 22 nt, Homo Sapiens
uggguuagugguugaauaguuu

SEQ ID NO: 241 - RNA, 22 nt, Homo Sapiens
uggagccuuguuguuuguucac

SEQ ID NO: 242 - RNA, 22 nt, Homo Sapiens
uggagagagcagguugcuaaga

SEQ ID NO: 243 - RNA, 22 nt, Homo Sapiens
uggagagaaagcgaagauguag

SEQ ID NO: 244 - RNA, 22 nt, Homo Sapiens
ugaaagagauguggugugugaa

SEQ ID NO: 245 - RNA, 22 nt, Homo Sapiens
ucugucauuuuucucuuuccau

SEQ ID NO: 246 - RNA, 22 nt, Homo Sapiens
uccaguacaggucucucauuuc

SEQ ID NO: 247 - RNA, 22 nt, Homo Sapiens
gcuguguuaacuguucaaacuc

SEQ ID NO: 248 - RNA, 22 nt, Homo Sapiens
gguccacaaggggagagcaggg

SEQ ID NO: 249 - RNA, 22 nt, Homo Sapiens
ggcccaggagggggagaaaggc

SEQ ID NO: 250 - RNA, 22 nt, Homo Sapiens
ggcaugugugagcagcugcagg

SEQ ID NO: 251 - RNA, 22 nt, Homo Sapiens
ggcaugauggagaggguggaga

SEQ ID NO: 252 - RNA, 22 nt, Homo Sapiens
uacaggcaggcacagaggcagu

SEQ ID NO: 253 - RNA, 22 nt, Homo Sapiens
uacucauuuaugcauuguuuug

SEQ ID NO: 254 - RNA, 22 nt, Homo Sapiens
uaggagugaaaauaaacucugu

SEQ ID NO: 255 - RNA, 22 nt, Homo Sapiens
uaggcagucucaguuguugggu

SEQ ID NO: 256 - RNA, 22 nt, Homo Sapiens
guccugagaacugcuccaguua

SEQ ID NO: 257 - RNA, 22 nt, Homo Sapiens
guguuauuaauaaacucuuuuu

SEQ ID NO: 258 - RNA, 22 nt, Homo Sapiens
agggcacacgucucucugaauu

SEQ ID NO: 259 - RNA, 22 nt, Homo Sapiens
auggauauuuuugaugcccaga

SEQ ID NO: 260 - RNA, 22 nt, Homo Sapiens
augaugagucuuagugaucugg

SEQ ID NO: 261 - RNA, 22 nt, Homo Sapiens
aucacuuugcagggauuacuaa

SEQ ID NO: 262 - RNA, 22 nt, Homo Sapiens
auucaagauaagggucugggag

SEQ ID NO: 263 - RNA, 22 nt, Homo Sapiens
aaguuuuuuuaaauuagcuagg

SEQ ID NO: 264 - RNA, 22 nt, Homo Sapiens
aaugugugggagaacagucuuu

SEQ ID NO: 265 - RNA, 22 nt, Homo Sapiens
cagcaguguugcgaaucaucac

SEQ ID NO: 266 - RNA, 22 nt, Homo Sapiens
gacaugauguagcagaugaugg

SEQ ID NO: 267 - RNA, 22 nt, Homo Sapiens
cuggugaggaaggagcagaguu

SEQ ID NO: 268 - RNA, 22 nt, Homo Sapiens
cugaaaugcuguugauuuuagu

SEQ ID NO: 269 - RNA, 22 nt, Homo Sapiens
uuugcaguguucaucaguauuu

SEQ ID NO: 270 - RNA, 22 nt, Homo Sapiens
uuuguaauagcaaaauacugga

SEQ ID NO: 271 - RNA, 22 nt, Homo Sapiens
ccaguacugucuugaugccugc

SEQ ID NO: 272 - RNA, 22 nt, Homo Sapiens
ccugcccauccugccuccacca

SEQ ID NO: 273 - RNA, 22 nt, Homo Sapiens
ucacugcaaccuccgccugccg

SEQ ID NO: 274 - RNA, 22 nt, Homo Sapiens
ugggaagaugcuggcaaggugc

SEQ ID NO: 275 - RNA, 22 nt, Homo Sapiens
uggcaaggugugggcuagagau

SEQ ID NO: 276 - RNA, 22 nt, Homo Sapiens
ugaguuuaagcuaagaagucug

SEQ ID NO: 277 - RNA, 22 nt, Homo Sapiens
guuguguggaagaugcuuugcc

SEQ ID NO: 278 - RNA, 22 nt, Homo Sapiens
guggcauuggugguggcauugg

SEQ ID NO: 279 - RNA, 22 nt, Homo Sapiens
gguggguuuccuuaauggcauc

SEQ ID NO: 280 - RNA, 22 nt, Homo Sapiens
guacuccagccugccuggguaa

SEQ ID NO: 281 - RNA, 22 nt, Homo Sapiens
ggcaugauucagcagaggagag

SEQ ID NO: 282 - RNA, 22 nt, Homo Sapiens
gggaggauccuugcucaacuua

SEQ ID NO: 283 - RNA, 22 nt, Homo Sapiens
ggccucagaagcugaggggaga

SEQ ID NO: 284 - RNA, 22 nt, Homo Sapiens
gcugcuccugcucucccucucc

SEQ ID NO: 285 - RNA, 22 nt, Homo Sapiens
ccugcccauccugccuccacca

SEQ ID NO: 286 - RNA, 22 nt, Homo Sapiens
ccagccugagguuccuggaggg

SEQ ID NO: 287 - RNA, 22 nt, Homo Sapiens
gagugagugugaucuuggcuca

SEQ ID NO: 288 - RNA, 22 nt, Homo Sapiens
gaggcagcaacuggugaggcac

SEQ ID NO: 289 - RNA, 22 nt, Homo Sapiens
aaacacaaugcaguaggaagag

SEQ ID NO: 290 - RNA, 22 nt, Homo Sapiens
acugcacuccauccuggggagc

SEQ ID NO: 291 - RNA, 22 nt, Homo Sapiens
agaaggcucgcucucucagggg

SEQ ID NO: 292 - RNA, 22 nt, Homo Sapiens
auggccuuuucucuuauccugg

SEQ ID NO: 293 - RNA, 22 nt, Homo Sapiens
auagaagagcagugggguagaa

SEQ ID NO: 294 - RNA, 22 nt, Homo Sapiens
agagauaaagagguuuaggcag

SEQ ID NO: 295 - RNA, 22 nt, Homo Sapiens
aggcagguggguguaugggucu

SEQ ID NO: 296 - RNA, 22 nt, Homo Sapiens
acugcacuccagccuggguggc

SEQ ID NO: 297 - RNA, 22 nt, Homo Sapiens
aaccugucauuccaaggacagu

SEQ ID NO: 298 - RNA, 22 nt, Homo Sapiens
gagauggaguuuuacuauguug

SEQ ID NO: 299 - RNA, 21 nt, Homo Sapiens
gacacaggcccagagaggcag

SEQ ID NO: 300 - RNA, 21 nt, Homo Sapiens
cuuuggcaagggagaagucac

SEQ ID NO: 301 - RNA, 22 nt, Homo Sapiens
cagaaucuuuugucucugagaa

SEQ ID NO: 302 - RNA, 22 nt, Homo Sapiens
auuugaggaggcuuuacagcca

SEQ ID NO: 303 - RNA, 22 nt, Homo Sapiens
ggaggcagugguugcagugagc

SEQ ID NO: 304 - RNA, 22 nt, Homo Sapiens
gugucucuguuguggcagucau

SEQ ID NO: 305 - RNA, 22 nt, Homo Sapiens
uaguuguuugggauugguagug

SEQ ID NO: 306 - RNA, 22 nt, Homo Sapiens
uacaggcaggcacagaggcagu

SEQ ID NO: 307 - RNA, 22 nt, Homo Sapiens
ucugugacuguauuuucccaaa

SEQ ID NO: 308 - RNA, 22 nt, Homo Sapiens
uucaggacuguggacugggcug

SEQ ID NO: 309 - RNA, 22 nt, Homo Sapiens
uuagcaguugugagacccuaga

SEQ ID NO: 310 - RNA, 22 nt, Homo Sapiens
uguguuggagcagaggcagggg

SEQ ID NO: 311 - RNA, 22 nt, Homo Sapiens
uggagcagaaaggcaggagucc

SEQ ID NO: 312 - RNA, 22 nt, Homo Sapiens
ucugccucccugucucacucuc

SEQ ID NO: 313 - RNA, 22 nt, Homo Sapiens
gcugcuccugcucucccucucc

SEQ ID NO: 314 - RNA, 22 nt, Homo Sapiens
gcuucuccuguccccucccuac

SEQ ID NO: 315 - RNA, 22 nt, Homo Sapiens
ggccugaggucagcaguagagg

SEQ ID NO: 316 - RNA, 22 nt, Homo Sapiens
ggcccaggagggggagaaaggc

SEQ ID NO: 317 - RNA, 22 nt, Homo Sapiens
cccuuuaguaacuugcaggguc

SEQ ID NO: 318 - RNA, 22 nt, Homo Sapiens
cuccuaggcuggagugcagugg

SEQ ID NO: 319 - RNA, 22 nt, Homo Sapiens
aauggcagucccuggagcagga

SEQ ID NO: 320 - RNA, 22 nt, Homo Sapiens
aucacuuugcagggauuacuaa

SEQ ID NO: 321 - RNA, 22 nt, Homo Sapiens
augaugcuggaacuggacaaca

SEQ ID NO: 322 - RNA, 22 nt, Homo Sapiens
augguguaggugaagagaacau

SEQ ID NO: 323 - RNA, 22 nt, Homo Sapiens
agguggcacugugugggguggg

SEQ ID NO: 324 - RNA, 22 nt, Homo Sapiens
agucagggagacugucaguaaa

SEQ ID NO: 325 - RNA, 22 nt, Homo Sapiens
agauaguucucuguuguugggg

SEQ ID NO: 326 - RNA, 22 nt, Homo Sapiens
agcuggauuguuuaccuggggc

SEQ ID NO: 327 - RNA, 22 nt, Homo Sapiens
acagcaguccagccugggugac

SEQ ID NO: 328 - RNA, 22 nt, Homo Sapiens
aaucuucacuaaaauggacaag

SEQ ID NO: 329 - RNA, 22 nt, Homo Sapiens
aagguggugucauguuuugggg

SEQ ID NO: 330 - RNA, 22 nt, Homo Sapiens
aaggcuguguaggcagaauucu

SEQ ID NO: 331 - RNA, 22 nt, Homo Sapiens
cuggcucuacccucucacuuca

SEQ ID NO: 332 - RNA, 22 nt, Homo Sapiens
gaccagccauccugguuuacau

SEQ ID NO: 333 - RNA, 22 nt, Homo Sapiens
gaauaaugucccacugggaggc

SEQ ID NO: 334 - RNA, 22 nt, Homo Sapiens
gagcuaaggauagaggugagga

SEQ ID NO: 335 - RNA, 22 nt, Homo Sapiens
gaggugaaggaacaaaugcuga

SEQ ID NO: 336 - RNA, 22 nt, Homo Sapiens
cuagcacagugcuuggcacaca

SEQ ID NO: 337 - RNA, 22 nt, Homo Sapiens
cguguucaguauggugggagau

SEQ ID NO: 338 - RNA, 22 nt, Homo Sapiens
caagugcuugaacauggcagag

SEQ ID NO: 339 - RNA, 22 nt, Homo Sapiens
auuuuucugcauuuguauugga

SEQ ID NO: 340 - RNA, 22 nt, Homo Sapiens
cagaucugggauacagcugugg

SEQ ID NO: 341 - RNA, 22 nt, Homo Sapiens
cagagcauuugugaggaguguu

SEQ ID NO: 342 - RNA, 22 nt, Homo Sapiens
cagugcugaguaugaaaggccc

SEQ ID NO: 343 - RNA, 22 nt, Homo Sapiens
cauaaaaucagaaaguauuacu

SEQ ID NO: 344 - RNA, 22 nt, Homo Sapiens
ggcccaggagggggagaaaggc

SEQ ID NO: 345 - RNA, 22 nt, Homo Sapiens
ggaggugacuguuacagaucgg

SEQ ID NO: 346 - RNA, 22 nt, Homo Sapiens
ggccugguggcuguuguuuugg

SEQ ID NO: 347 - RNA, 22 nt, Homo Sapiens
ggcugcagugaacuaugaucgu

SEQ ID NO: 348 - RNA, 22 nt, Homo Sapiens
ggcugggcaugguggcucacgc

SEQ ID NO: 349 - RNA, 22 nt, Homo Sapiens
gcuggguugagcugggcugaga

SEQ ID NO: 350 - RNA, 22 nt, Homo Sapiens
gauugcuugagcccuggagguu

SEQ ID NO: 351 - RNA, 22 nt, Homo Sapiens
gcagcgcugagaugauuuguug

SEQ ID NO: 352 - RNA, 22 nt, Homo Sapiens
uaugauuguuucauuuguugga

SEQ ID NO: 353 - RNA, 22 nt, Homo Sapiens
uauuaguugauuccaagggacc

SEQ ID NO: 354 - RNA, 22 nt, Homo Sapiens
guuacagcucucaaagaagaca

SEQ ID NO: 355 - RNA, 22 nt, Homo Sapiens
guuauugucagggucucccuuu

SEQ ID NO: 356 - RNA, 22 nt, Homo Sapiens
uaagaagagaaagaagaggcug

SEQ ID NO: 357 - RNA, 22 nt, Homo Sapiens
ucucuaagacaaaggagaaguc

SEQ ID NO: 358 - RNA, 22 nt, Homo Sapiens
ucuuggugcuuuugcuggauga

SEQ ID NO: 359 - RNA, 22 nt, Homo Sapiens
ucuugggauagugucucauggc

SEQ ID NO: 360 - RNA, 22 nt, Homo Sapiens
uccucaucuuugagucccagcg

SEQ ID NO: 361 - RNA, 22 nt, Homo Sapiens
ucaggcugaggucaucugcauc

SEQ ID NO: 362 - RNA, 22 nt, Homo Sapiens
ugaugacugaaguggccuggac

SEQ ID NO: 363 - RNA, 22 nt, Homo Sapiens
ugcagccuugaacucuuucugg

SEQ ID NO: 364 - RNA, 22 nt, Homo Sapiens
ugagauggugucauauugcugg

SEQ ID NO: 365 - RNA, 22 nt, Homo Sapiens
ugagggcaggugugaaaaugcu

SEQ ID NO: 366 - RNA, 22 nt, Homo Sapiens
uggcucugucuauugggaugug

SEQ ID NO: 367 - RNA, 22 nt, Homo Sapiens
uggggcacuguggaggugucau

SEQ ID NO: 368 - RNA, 22 nt, Homo Sapiens
uucaggacuguggacugggcug

SEQ ID NO: 369 - RNA, 22 nt, Homo Sapiens
uugugguuuucccaggugguag

SEQ ID NO: 370 - RNA, 22 nt, Homo Sapiens
uucuaugauucucuaaguagca

SEQ ID NO: 371 - RNA, 22 nt, Homo Sapiens
uucuggguuuuuguggguuugc

SEQ ID NO: 372 - RNA, 22 nt, Homo Sapiens
uguagcagaacacuggguccag

SEQ ID NO: 373 - RNA, 22 nt, Homo Sapiens
gccaggaugaagaggaggagaa

SEQ ID NO: 374 - RNA, 22 nt, Homo Sapiens
ggccugguggcuguuguuuugg

SEQ ID NO: 375 - RNA, 22 nt, Homo Sapiens
ggcaaggaagaaagcagaaguu

SEQ ID NO: 376 - RNA, 22 nt, Homo Sapiens
gacaugauguagcagaugaugg

SEQ ID NO: 377 - RNA, 22 nt, Homo Sapiens
aggcacugugcaggaugauggg

SEQ ID NO: 378 - RNA, 22 nt, Homo Sapiens
agcuccaggagcuggcaggagg

SEQ ID NO: 379 - RNA, 22 nt, Homo Sapiens
acugcacuccagccuggguggc

SEQ ID NO: 380 - RNA, 22 nt, Homo Sapiens
gagcuaaggauagaggugagga

SEQ ID NO: 381 - RNA, 22 nt, Homo Sapiens
cugcugccuuucucucagagau

SEQ ID NO: 382 - RNA, 22 nt, Homo Sapiens
ccacugcacuccagccugggug

SEQ ID NO: 383 - RNA, 22 nt, Homo Sapiens
ggcaugauggagaggguggaga

SEQ ID NO: 384 - RNA, 22 nt, Homo Sapiens
uuaaacuucccugcugccccag

SEQ ID NO: 385 - RNA, 22 nt, Homo Sapiens
ugaggaggugcuaccagcgucu

SEQ ID NO: 386 - RNA, 22 nt, Homo Sapiens
ugagagagcaagugaauuuccc

SEQ ID NO: 387 - RNA, 22 nt, Homo Sapiens
uccauugcacuccagucugggc

SEQ ID NO: 388 - RNA, 22 nt, Homo Sapiens
ugagaucaucguuacaagcagc

SEQ ID NO: 389 - RNA, 22 nt, Homo Sapiens
ugagaugaaccagguaucucag

SEQ ID NO: 390 - RNA, 22 nt, Homo Sapiens
uucacauguugcucaguuuugc

SEQ ID NO: 391 - RNA, 22 nt, Homo Sapiens
ugguccagaggaggaaugaggg

SEQ ID NO: 392 - RNA, 22 nt, Homo Sapiens
uggaauggcugaagacugugaa

SEQ ID NO: 393 - RNA, 22 nt, Homo Sapiens
ugcuguaguauguauauaguau

SEQ ID NO: 394 - RNA, 22 nt, Homo Sapiens
ggcaugauggagaggguggaga

SEQ ID NO: 395 - RNA, 22 nt, Homo Sapiens
ggcccaggagggggagaaaggc

SEQ ID NO: 396 - RNA, 22 nt, Homo Sapiens
ggcaugugugagcagcugcagg

SEQ ID NO: 397 - RNA, 22 nt, Homo Sapiens
ggccugaggucagcaguagagg

SEQ ID NO: 398 - RNA, 22 nt, Homo Sapiens
gcagcucccuauuccaugacag

SEQ ID NO: 399 - RNA, 22 nt, Homo Sapiens
ggaggcagugguugcagugagc

SEQ ID NO: 400 - RNA, 22 nt, Homo Sapiens
gucuuguuccaguuucucagcc

SEQ ID NO: 401 - RNA, 22 nt, Homo Sapiens
gaggagguggggcagcagcagg

SEQ ID NO: 402 - RNA, 22 nt, Homo Sapiens
gagguagagguugcagugaguc

SEQ ID NO: 403 - RNA, 22 nt, Homo Sapiens
gaggucacuguuggaugucaga

SEQ ID NO: 404 - RNA, 22 nt, Homo Sapiens
gagguagagguugcagugagug

SEQ ID NO: 405 - RNA, 22 nt, Homo Sapiens
agaaguaguaguagcaguagua

SEQ ID NO: 406 - RNA, 22 nt, Homo Sapiens
aaccugcugguaaagcacuggc

SEQ ID NO: 407 - RNA, 22 nt, Homo Sapiens
agacuguuccgucagacucagu

SEQ ID NO: 408 - RNA, 22 nt, Homo Sapiens
aggcaagagguugcagugagcu

SEQ ID NO: 409 - RNA, 22 nt, Homo Sapiens
auacagcucucucuggggacuu

SEQ ID NO: 410 - RNA, 22 nt, Homo Sapiens
uugagagcauagagccaggaag

SEQ ID NO: 411 - RNA, 22 nt, Homo Sapiens
gaggucacuguuggaugucaga

SEQ ID NO: 412 - RNA, 22 nt, Homo Sapiens
ccagccugagguuccuggaggg

SEQ ID NO: 413 - RNA, 22 nt, Homo Sapiens
uuccaguucucagcacagcgcu

SEQ ID NO: 414 - RNA, 22 nt, Homo Sapiens
ucccuucagagcccauggguuu

SEQ ID NO: 415 - RNA, 22 nt, Homo Sapiens
ucuuggugcuuuugcuggauga

SEQ ID NO: 416 - RNA, 22 nt, Homo Sapiens
ucuuccccaccuucggcuugca

SEQ ID NO: 417 - RNA, 22 nt, Homo Sapiens
ucugccucccugucucacucuc

SEQ ID NO: 418 - RNA, 22 nt, Homo Sapiens
ugauauauaaucagcccaugau

SEQ ID NO: 419 - RNA, 22 nt, Homo Sapiens
ugugcacaacaugcagguuugu

SEQ ID NO: 420 - RNA, 22 nt, Homo Sapiens
uaggcccauuaauaguguacau

SEQ ID NO: 421 - RNA, 22 nt, Homo Sapiens
ggagcuguaguuuuucccacau

SEQ ID NO: 422 - RNA, 22 nt, Homo Sapiens
cagcagagcccauguguucaug

SEQ ID NO: 423 - RNA, 22 nt, Homo Sapiens
cagguacuuuuugguuuacaug

SEQ ID NO: 424 - RNA, 22 nt, Homo Sapiens
cugggcaguaauguaguugaga

SEQ ID NO: 425 - RNA, 22 nt, Homo Sapiens
aggcaagagguugcagugagcu

SEQ ID NO: 426 - RNA, 22 nt, Homo Sapiens
agaugacacagagcucaggaaa

SEQ ID NO: 427 - RNA, 22 nt, Homo Sapiens
uugcuuugguucaaguuaggca

SEQ ID NO: 428 - RNA, 22 nt, Homo Sapiens
uugguugcugaugagcuuugag

SEQ ID NO: 429 - RNA, 22 nt, Homo Sapiens
uuuauuaguuguccuugguuua

SEQ ID NO: 430 - RNA, 22 nt, Homo Sapiens
uuguaaauaacauuuuuuagca

SEQ ID NO: 431 - RNA, 22 nt, Homo Sapiens
uugagcaaaauaucugguuuca

SEQ ID NO: 432 - RNA, 22 nt, Homo Sapiens
uugcacuccagccuggguaaca

SEQ ID NO: 433 - RNA, 22 nt, Homo Sapiens
uugcacuccagccugggugaca

SEQ ID NO: 434 - RNA, 22 nt, Homo Sapiens
uuuggggucuccccagcaugca

SEQ ID NO: 435 - RNA, 22 nt, Homo Sapiens
uuuuuguggaauauuuuuuuaa

SEQ ID NO: 436 - RNA, 22 nt, Homo Sapiens
agcagcacagaaauauuggcac

SEQ ID NO: 437 - RNA, 22 nt, Homo Sapiens
aggcaagagguugcagugagcu

SEQ ID NO: 438 - RNA, 22 nt, Homo Sapiens
agguccucacacacagcucugc

SEQ ID NO: 439 - RNA, 22 nt, Homo Sapiens
aggguuguuaguuuuuugguug

SEQ ID NO: 440 - RNA, 22 nt, Homo Sapiens
aguagaacagaauauuuuagcu

SEQ ID NO: 441 - RNA, 22 nt, Homo Sapiens
augggagacugaggggcggacg

SEQ ID NO: 442 - RNA, 22 nt, Homo Sapiens
auugcacuccagccugggcaau

SEQ ID NO: 443 - RNA, 22 nt, Homo Sapiens
auugcacuccagccugggugac

SEQ ID NO: 444 - RNA, 22 nt, Homo Sapiens
auugcacuccagcuugggcaac

SEQ ID NO: 445 - RNA, 22 nt, Homo Sapiens
auugcacuucagccugggugac

SEQ ID NO: 446 - RNA, 22 nt, Homo Sapiens
auggagcuguuuucuucagagc

SEQ ID NO: 447 - RNA, 22 nt, Homo Sapiens
augccuguaaucccagcacuuu

SEQ ID NO: 448 - RNA, 22 nt, Homo Sapiens
augccuguaaucccagcauuuu

SEQ ID NO: 449 - RNA, 22 nt, Homo Sapiens
aaauugccgagaugauguuugg

SEQ ID NO: 450 - RNA, 22 nt, Homo Sapiens
aagcagaacuguuuuguuuucu

SEQ ID NO: 451 - RNA, 22 nt, Homo Sapiens
aacccuggaggcagagguugcg

SEQ ID NO: 452 - RNA, 22 nt, Homo Sapiens
aagguggugucauguuuugggg

SEQ ID NO: 453 - RNA, 22 nt, Homo Sapiens
aaugaagccacagagauuugcu

SEQ ID NO: 454 - RNA, 22 nt, Homo Sapiens
aaucccagcuacucgggaggcu

SEQ ID NO: 455 - RNA, 22 nt, Homo Sapiens
acacaucuaauggcugugcuga

SEQ ID NO: 456 - RNA, 22 nt, Homo Sapiens
acaaaaaauuagccagacuggu

SEQ ID NO: 457 - RNA, 22 nt, Homo Sapiens
acuguacuucagccuggguaac

SEQ ID NO: 458 - RNA, 22 nt, Homo Sapiens
acuguacuccagccugggcaac

SEQ ID NO: 459 - RNA, 22 nt, Homo Sapiens
acuguacuucagccugggcaac

SEQ ID NO: 460 - RNA, 22 nt, Homo Sapiens
acugcacucuagccugggcaac

SEQ ID NO: 461 - RNA, 22 nt, Homo Sapiens
acugcacuucagccugggcaau

SEQ ID NO: 462 - RNA, 22 nt, Homo Sapiens
acugcacuccagccuggcgaca

SEQ ID NO: 463 - RNA, 22 nt, Homo Sapiens
acugcacuccagccugggcgau

SEQ ID NO: 464 - RNA, 22 nt, Homo Sapiens
acccgagagguggagguugcag

SEQ ID NO: 465 - RNA, 22 nt, Homo Sapiens
acugcacuccagccuggcaaca

SEQ ID NO: 466 - RNA, 22 nt, Homo Sapiens
cuugcacuccacagccugggug

SEQ ID NO: 467 - RNA, 22 nt, Homo Sapiens
cugaggcaggagggcucaggag

SEQ ID NO: 468 - RNA, 22 nt, Homo Sapiens
cuccuaggcuggagugcagugg

SEQ ID NO: 469 - RNA, 22 nt, Homo Sapiens
cucuugaaggaguauuuguguu

SEQ ID NO: 470 - RNA, 22 nt, Homo Sapiens
cucugccucccgggucuaggcu

SEQ ID NO: 471 - RNA, 22 nt, Homo Sapiens
gagguagagguugcagugagug

SEQ ID NO: 472 - RNA, 22 nt, Homo Sapiens
gagguagagguugcagugaguc

SEQ ID NO: 473 - RNA, 22 nt, Homo Sapiens
gacuggcuaauuuauaaaggaa

SEQ ID NO: 474 - RNA, 22 nt, Homo Sapiens
cacugcacuccagccugggcga

SEQ ID NO: 475 - RNA, 22 nt, Homo Sapiens
cacugcacuccagccuggguaa

SEQ ID NO: 476 - RNA, 22 nt, Homo Sapiens
cacugcacuccagccuggguga

SEQ ID NO: 477 - RNA, 22 nt, Homo Sapiens
auuguucuccagccugggcgac

SEQ ID NO: 478 - RNA, 22 nt, Homo Sapiens
auugcacaccaaccugggcaac

SEQ ID NO: 479 - RNA, 22 nt, Homo Sapiens
cacugcacucagccugggugac

SEQ ID NO: 480 - RNA, 22 nt, Homo Sapiens
cacugcacuccacccugggcaa

SEQ ID NO: 481 - RNA, 22 nt, Homo Sapiens
ccagccugagguuccuggaggg

SEQ ID NO: 482 - RNA, 22 nt, Homo Sapiens
cccaggaggcggagguugcagu

SEQ ID NO: 483 - RNA, 22 nt, Homo Sapiens
ccacugcacuccagccugggug

SEQ ID NO: 484 - RNA, 22 nt, Homo Sapiens
ccaaagugcuggcguuacaggu

SEQ ID NO: 485 - RNA, 22 nt, Homo Sapiens
cauugcacuccagccuggguga

SEQ ID NO: 486 - RNA, 22 nt, Homo Sapiens
ccaaagugcuaggaauacaggu

SEQ ID NO: 487 - RNA, 22 nt, Homo Sapiens
cguguaaucccagcuacuuggg

SEQ ID NO: 488 - RNA, 22 nt, Homo Sapiens
ggaggcagugguugcagugagc

SEQ ID NO: 489 - RNA, 22 nt, Homo Sapiens
gcuguguuaacuguucaaacuc

SEQ ID NO: 490 - RNA, 22 nt, Homo Sapiens
gaguauuaccuauaucaccgug

SEQ ID NO: 491 - RNA, 22 nt, Homo Sapiens
gcacucaagccuggguuacaga

SEQ ID NO: 492 - RNA, 22 nt, Homo Sapiens
gcaagugcugucauauggaaga

SEQ ID NO: 493 - RNA, 22 nt, Homo Sapiens
gccuguaaucccagcuacuugg

SEQ ID NO: 494 - RNA, 22 nt, Homo Sapiens
gccauugcacuccagccugggc

SEQ ID NO: 495 - RNA, 22 nt, Homo Sapiens
gccauugcacuccagccuggac

SEQ ID NO: 496 - RNA, 22 nt, Homo Sapiens
ggcuggagaguaaaucaggucu

SEQ ID NO: 497 - RNA, 22 nt, Homo Sapiens
gggcaugaugauggcacuagcg

SEQ ID NO: 498 - RNA, 19 nt, Homo Sapiens
gggggaugauagcagccag

SEQ ID NO: 499 - RNA, 22 nt, Homo Sapiens
ggcaugugugagcagcugcagg

SEQ ID NO: 500 - RNA, 22 nt, Homo Sapiens
ggaggaggugugaagaaaugaa

SEQ ID NO: 501 - RNA, 22 nt, Homo Sapiens
ggaguguaaagaaggauguuac

SEQ ID NO: 502 - RNA, 22 nt, Homo Sapiens
uaggaaguauuuuuuaaaaaca

SEQ ID NO: 503 - RNA, 22 nt, Homo Sapiens
uacccugugaucaucugugugc

SEQ ID NO: 504 - RNA, 22 nt, Homo Sapiens
uaaugcucagcuggaccagugu

SEQ ID NO: 505 - RNA, 22 nt, Homo Sapiens
uauugaucugucccagccugug

SEQ ID NO: 506 - RNA, 22 nt, Homo Sapiens
uauugcacuccagccugggcaa

SEQ ID NO: 507 - RNA, 22 nt, Homo Sapiens
uauugcuaagaauucagguagu

SEQ ID NO: 508 - RNA, 22 nt, Homo Sapiens
uauaacagccagcuuggauuca

SEQ ID NO: 509 - RNA, 22 nt, Homo Sapiens
uauuacauucauuuugaugguu

SEQ ID NO: 510 - RNA, 22 nt, Homo Sapiens
gugcuugaccaugugguggcag

SEQ ID NO: 511 - RNA, 22 nt, Homo Sapiens
guggccuuucuggucuguguau

SEQ ID NO: 512 - RNA, 22 nt, Homo Sapiens
guacuccagccugccuggguaa

SEQ ID NO: 513 - RNA, 22 nt, Homo Sapiens
guauguauuuauagauguucuu

SEQ ID NO: 514 - RNA, 22 nt, Homo Sapiens
gguggguuuccuuaauggcauc

SEQ ID NO: 515 - RNA, 22 nt, Homo Sapiens
gucuuccuccguccccaccucc

SEQ ID NO: 516 - RNA, 22 nt, Homo Sapiens
gugaagaaguugcuucauccuu

SEQ ID NO: 517 - RNA, 22 nt, Homo Sapiens
uguagcagaacacuggguccag

SEQ ID NO: 518 - RNA, 22 nt, Homo Sapiens
uguaaacauccccgacuggaag

SEQ ID NO: 519 - RNA, 22 nt, Homo Sapiens
uucauuaggccaggugcggugg

SEQ ID NO: 520 - RNA, 22 nt, Homo Sapiens
uuccaguaguuacuccucccug

SEQ ID NO: 521 - RNA, 22 nt, Homo Sapiens
uucagcauugccaguguuucca

SEQ ID NO: 522 - RNA, 22 nt, Homo Sapiens
uuaacugagaggaucugaguag

SEQ ID NO: 523 - RNA, 22 nt, Homo Sapiens
ugcuacauuucuucauucuugg

SEQ ID NO: 524 - RNA, 22 nt, Homo Sapiens
uggaagaauaggcaguauugga

SEQ ID NO: 525 - RNA, 22 nt, Homo Sapiens
uggcaggauuccugggauuuca

SEQ ID NO: 526 - RNA, 22 nt, Homo Sapiens
ugagaugaacccgguaccucag

SEQ ID NO: 527 - RNA, 22 nt, Homo Sapiens
ugcagauacauguguaacugaa

SEQ ID NO: 528 - RNA, 22 nt, Homo Sapiens
ugaggaaggugugagaaaugag

SEQ ID NO: 529 - RNA, 22 nt, Homo Sapiens
ugaggcagaaggauuacuugag

SEQ ID NO: 530 - RNA, 22 nt, Homo Sapiens
ugagggggaaggugugugugug

SEQ ID NO: 531 - RNA, 22 nt, Homo Sapiens
ucauaaacuggcaagcacuacc

SEQ ID NO: 532 - RNA, 22 nt, Homo Sapiens
ucauugguugcauaauuugauc

SEQ ID NO: 533 - RNA, 22 nt, Homo Sapiens
ugaaguaguuagguuguagcuc

SEQ ID NO: 534 - RNA, 22 nt, Homo Sapiens
ugcagauacauguguaacugaa

SEQ ID NO: 535 - RNA, 22 nt, Homo Sapiens
uggggcacuguggaggugucau

SEQ ID NO: 536 - RNA, 22 nt, Homo Sapiens
uggagagauagugauuuagcuc

SEQ ID NO: 537 - RNA, 22 nt, Homo Sapiens
guucuggagcccauacucacca

SEQ ID NO: 538 - RNA, 22 nt, Homo Sapiens
guucuucugggagaaaaauggc

SEQ ID NO: 539 - RNA, 22 nt, Homo Sapiens
ucaaagcugcagauugccugug

SEQ ID NO: 540 - RNA, 22 nt, Homo Sapiens
ggcagcugugcagagugggggu

SEQ ID NO: 541 - RNA, 22 nt, Homo Sapiens
gggggaucauuauaaaaauacu

SEQ ID NO: 542 - RNA, 22 nt, Homo Sapiens
gccaggaugaagaggaggagaa

SEQ ID NO: 543 - RNA, 22 nt, Homo Sapiens
gaaaguaguaaguuguauaguu

SEQ ID NO: 544 - RNA, 22 nt, Homo Sapiens
gaacuguacuggacccauaguu

SEQ ID NO: 545 - RNA, 22 nt, Homo Sapiens
gaggacccuuaggucagacaga

SEQ ID NO: 546 - RNA, 22 nt, Homo Sapiens
cucaccaguuacucuccaguug

SEQ ID NO: 547 - RNA, 22 nt, Homo Sapiens
cugaauguaaucuuaguuguaa

SEQ ID NO: 548 - RNA, 22 nt, Homo Sapiens
cuggagaggagcggucacuggu

SEQ ID NO: 549 - RNA, 22 nt, Homo Sapiens
acugcacuccagucugggugac

SEQ ID NO: 550 - RNA, 22 nt, Homo Sapiens
uuugcaccugagacagauagcc

SEQ ID NO: 551 - RNA, 22 nt, Homo Sapiens
uugccuggagacauuucuacug

SEQ ID NO: 552 - RNA, 22 nt, Homo Sapiens
acugcagcuucagggacuugug

SEQ ID NO: 553 - RNA, 22 nt, Homo Sapiens
acacaggcccagagaggcagug

SEQ ID NO: 554 - RNA, 22 nt, Homo Sapiens
aggggguuuagcuccacagggu

SEQ ID NO: 555 - RNA, 22 nt, Homo Sapiens
agagacacagacacaugggaga

SEQ ID NO: 556 - RNA, 22 nt, Homo Sapiens
cugugccugugacgagggauga

SEQ ID NO: 557 - RNA, 22 nt, Homo Sapiens
gaccccuugcccguggcuccca

SEQ ID NO: 558 - RNA, 22 nt, Homo Sapiens
ccccaccccaguggagcucacc

SEQ ID NO: 559 - RNA, 22 nt, Homo Sapiens
cccaggaggcggagguugcagu

SEQ ID NO: 560 - RNA, 22 nt, Homo Sapiens
cacugcaacccccgccucccag

SEQ ID NO: 561 - RNA, 22 nt, Homo Sapiens
gcuucuccuguccccucccuac

SEQ ID NO: 562 - RNA, 22 nt, Homo Sapiens
ggcugggcaugguggcucacgc

SEQ ID NO: 563 - RNA, 22 nt, Homo Sapiens
guucuggagcccauacucacca

SEQ ID NO: 564 - RNA, 22 nt, Homo Sapiens
guguauguguguaugucugugu

SEQ ID NO: 565 - RNA, 22 nt, Homo Sapiens
guacaguggguguagggaccag

SEQ ID NO: 566 - RNA, 22 nt, Homo Sapiens
uguggcagaaggcucuggauua

SEQ ID NO: 567 - RNA, 22 nt, Homo Sapiens
ugaggacaggagguugugaguu

SEQ ID NO: 568 - RNA, 22 nt, Homo Sapiens
ucagagcagugccgaagcccag

SEQ ID NO: 569 - RNA, 22 nt, Homo Sapiens
ucuuccccaccuucggcuugca

SEQ ID NO: 570 - RNA, 22 nt, Homo Sapiens
guggaguucucugcuaguccua

SEQ ID NO: 571 - RNA, 22 nt, Homo Sapiens
uaaaguguguaugggcaggugu

SEQ ID NO: 572 - RNA, 22 nt, Homo Sapiens
ggaguguaaagaaggauguuac

SEQ ID NO: 573 - RNA, 22 nt, Homo Sapiens
gacauggagacaacagccaaau

SEQ ID NO: 574 - RNA, 22 nt, Homo Sapiens
gagcagguuuggaauggcucca

SEQ ID NO: 575 - RNA, 22 nt, Homo Sapiens
gaggucacuguuggaugucaga

SEQ ID NO: 576 - RNA, 22 nt, Homo Sapiens
cucagauacuugggagguugag

SEQ ID NO: 577 - RNA, 22 nt, Homo Sapiens
aaggcuguguaggcagaauucu

SEQ ID NO: 578 - RNA, 22 nt, Homo Sapiens
agaaguguaaauaaguauguau

SEQ ID NO: 579 - RNA, 22 nt, Homo Sapiens
uuugcacacuuuccaaguugcc

SEQ ID NO: 580 - RNA, 22 nt, Homo Sapiens
uuuguaauagcaaaauacugga

SEQ ID NO: 581 - RNA, 22 nt, Homo Sapiens
uuuucaauggcugacacugucu

SEQ ID NO: 582 - RNA, 22 nt, Homo Sapiens
uuuuuaucuuuuucuccagaug

SEQ ID NO: 583 - RNA, 22 nt, Homo Sapiens
uugguugcugaugagcuuugag

SEQ ID NO: 584 - RNA, 22 nt, Homo Sapiens
uuuccuguuuugguuuggagag

SEQ ID NO: 585 - RNA, 22 nt, Homo Sapiens
uugcacuccagucugggugaca

SEQ ID NO: 586 - RNA, 22 nt, Homo Sapiens
uucucauuggcccacaggggua

SEQ ID NO: 587 - RNA, 22 nt, Homo Sapiens
agaagguuggggcuggaggucu

SEQ ID NO: 588 - RNA, 22 nt, Homo Sapiens
acuggcccacuccauuuagggu

SEQ ID NO: 589 - RNA, 22 nt, Homo Sapiens
acugcacuccagucugggugac

SEQ ID NO: 590 - RNA, 20 nt, Homo Sapiens
acaggagcauggagaggcua

SEQ ID NO: 591 - RNA, 22 nt, Homo Sapiens
aagcagccuuggaccaggaggg

SEQ ID NO: 592 - RNA, 22 nt, Homo Sapiens
aacacguugcaucugugucucu

SEQ ID NO: 593 - RNA, 22 nt, Homo Sapiens
aaccugcugguaaagcacuggc

SEQ ID NO: 594 - RNA, 22 nt, Homo Sapiens
aggugagaaaacugaggcucag

SEQ ID NO: 595 - RNA, 22 nt, Homo Sapiens
augguguaggugaagagaacau

SEQ ID NO: 596 - RNA, 22 nt, Homo Sapiens
augggcaguuucuucccuuucc

SEQ ID NO: 597 - RNA, 22 nt, Homo Sapiens
aguauuucuuguuuuauugaga

SEQ ID NO: 598 - RNA, 22 nt, Homo Sapiens
agguggaguuuugcuuucccau

SEQ ID NO: 599 - RNA, 22 nt, Homo Sapiens
cucugccucccgggucuaggcu

SEQ ID NO: 600 - RNA, 22 nt, Homo Sapiens
cugugcauguugauauccuggc

SEQ ID NO: 601 - RNA, 22 nt, Homo Sapiens
cuggcucccucucuucucuccc

SEQ ID NO: 602 - RNA, 22 nt, Homo Sapiens
gagguagagguugcagugagug

SEQ ID NO: 603 - RNA, 22 nt, Homo Sapiens
gagguagagguugcagugaguc

SEQ ID NO: 604 - RNA, 22 nt, Homo Sapiens
gagagugcuuuggguguaggcc

SEQ ID NO: 605 - RNA, 22 nt, Homo Sapiens
gaaaccuacacaucccacuaac

SEQ ID NO: 606 - RNA, 22 nt, Homo Sapiens
cagaggaugcggcugggaacgg

SEQ ID NO: 607 - RNA, 22 nt, Homo Sapiens
caugguacugccacagaagagu

SEQ ID NO: 608 - RNA, 22 nt, Homo Sapiens
ccaggguacucugggaucacuu

SEQ ID NO: 609 - RNA, 22 nt, Homo Sapiens
cuacuuguuccucucaccucaa

SEQ ID NO: 610 - RNA, 22 nt, Homo Sapiens
ggaguaugagagagaaugggac

SEQ ID NO: 611 - RNA, 22 nt, Homo Sapiens
ggcaugauggagaggguggaga

SEQ ID NO: 612 - RNA, 22 nt, Homo Sapiens
gggggaucauuauaaaaauacu

SEQ ID NO: 613 - RNA, 22 nt, Homo Sapiens
gguagcuagaggggagauagca

SEQ ID NO: 614 - RNA, 22 nt, Homo Sapiens
ggugaugcauuuaaaagggcag

SEQ ID NO: 615 - RNA, 22 nt, Homo Sapiens
gcugcuccugcucucccucucc

SEQ ID NO: 616 - RNA, 22 nt, Homo Sapiens
ggaggcagugguugcagugagc

SEQ ID NO: 617 - RNA, 22 nt, Homo Sapiens
ggagcuguaguuuuucccacau

SEQ ID NO: 618 - RNA, 22 nt, Homo Sapiens
gcagagaggaaggcuaugaaac

SEQ ID NO: 619 - RNA, 22 nt, Homo Sapiens
gcagcaggcagggccaggcagg

SEQ ID NO: 620 - RNA, 22 nt, Homo Sapiens
guucacaguucagccuguaaca

SEQ ID NO: 621 - RNA, 22 nt, Homo Sapiens
uaagaagagaaagaagaggcug

SEQ ID NO: 622 - RNA, 22 nt, Homo Sapiens
ucugguuugagagacaaugaca

SEQ ID NO: 623 - RNA, 22 nt, Homo Sapiens
ucuuuuuguuguagcuguaugg

SEQ ID NO: 624 - RNA, 22 nt, Homo Sapiens
uccaaaauuaaagguuguagaa

SEQ ID NO: 625 - RNA, 22 nt, Homo Sapiens
ucagagugagucccugggacua

SEQ ID NO: 626 - RNA, 22 nt, Homo Sapiens
ucaguagcugucaaaacuggag

SEQ ID NO: 627 - RNA, 22 nt, Homo Sapiens
uccagggugggccucagacccu

SEQ ID NO: 628 - RNA, 22 nt, Homo Sapiens
uccagugaaacaggucucuuug

SEQ ID NO: 629 - RNA, 22 nt, Homo Sapiens
ugacuggaggaagggagguaag

SEQ ID NO: 630 - RNA, 22 nt, Homo Sapiens
ugaaaugcuuuuaggacacugc

SEQ ID NO: 631 - RNA, 22 nt, Homo Sapiens
uguggcagaaggcucuggauua

SEQ ID NO: 632 - RNA, 22 nt, Homo Sapiens
ugugcugguugcccccgagggg

SEQ ID NO: 633 - RNA, 22 nt, Homo Sapiens
ugguuaguuuuaugggccugga

SEQ ID NO: 634 - RNA, 22 nt, Homo Sapiens
uguaguuugaugcuagaacacu

SEQ ID NO: 635 - RNA, 22 nt, Homo Sapiens
uuaaugcuaaucgugauagggg

SEQ ID NO: 636 - RNA, 22 nt, Homo Sapiens
uuccagauggguaggaauaccu

SEQ ID NO: 637 - RNA, 22 nt, Homo Sapiens
uggagagauaagccaaguaucc

SEQ ID NO: 638 - RNA, 22 nt, Homo Sapiens
uggaaugaggaagggugugguc

SEQ ID NO: 639 - RNA, 22 nt, Homo Sapiens
uggagaauuaaaaaggguagug

SEQ ID NO: 640 - RNA, 22 nt, Homo Sapiens
ugcuagguuuuuuccuuucccc

SEQ ID NO: 641 - RNA, 22 nt, Homo Sapiens
ugguccagaggaggaaugaggg

SEQ ID NO: 642 - RNA, 22 nt, Homo Sapiens
uggucuccuauccuggcucaca

SEQ ID NO: 643 - RNA, 22 nt, Homo Sapiens
ugggcucgcucuucagucucgg

SEQ ID NO: 644 - RNA, 22 nt, Homo Sapiens
uggcacagaucagcagaacagg

SEQ ID NO: 645 - RNA, 22 nt, Homo Sapiens
uucaggcaccaggcacuuugcc

SEQ ID NO: 646 - RNA, 22 nt, Homo Sapiens
ugucuucauccaggaaccacau

SEQ ID NO: 647 - RNA, 21 nt, Homo Sapiens
ugugauaguucuuuuggaggc

SEQ ID NO: 648 - RNA, 22 nt, Homo Sapiens
uguguuggagcagaggcagggg

SEQ ID NO: 649 - RNA, 22 nt, Homo Sapiens
ugcagccuugaacucuuucugg

SEQ ID NO: 650 - RNA, 22 nt, Homo Sapiens
uccccagguucuaguccugagu

SEQ ID NO: 651 - RNA, 22 nt, Homo Sapiens
ucagagcagugccgaagcccag

SEQ ID NO: 652 - RNA, 22 nt, Homo Sapiens
ucaggcugaggucaucugcauc

SEQ ID NO: 653 - RNA, 22 nt, Homo Sapiens
ucuuccccaccuucggcuugca

SEQ ID NO: 654 - RNA, 22 nt, Homo Sapiens
ucugcuuggacugaucauugaa

SEQ ID NO: 655 - RNA, 22 nt, Homo Sapiens
guuuuguugucucuguguugua

SEQ ID NO: 656 - RNA, 22 nt, Homo Sapiens
gugugggcagggccgugcuccc

SEQ ID NO: 657 - RNA, 22 nt, Homo Sapiens
uaucucuugccuugaccuccua

SEQ ID NO: 658 - RNA, 22 nt, Homo Sapiens
gcagcaggcagggccaggcagg

SEQ ID NO: 659 - RNA, 22 nt, Homo Sapiens
ggaggaggaggcuggugcuggu

SEQ ID NO: 660 - RNA, 22 nt, Homo Sapiens
gguagcuagaggggagauagca

SEQ ID NO: 661 - RNA, 22 nt, Homo Sapiens
ggccugguggcuguuguuuugg

SEQ ID NO: 662 - RNA, 22 nt, Homo Sapiens
ggcccaggagggggagaaaggc

SEQ ID NO: 663 - RNA, 22 nt, Homo Sapiens
ggaguaugagagagaaugggac

SEQ ID NO: 664 - RNA, 22 nt, Homo Sapiens
ccccaccccaguggagcucacc

SEQ ID NO: 665 - RNA, 22 nt, Homo Sapiens
cagagcauuugugaggaguguu

SEQ ID NO: 666 - RNA, 22 nt, Homo Sapiens
cacugcacuccacccugggcaa

SEQ ID NO: 667 - RNA, 22 nt, Homo Sapiens
gagagagguagaggggagcaga

SEQ ID NO: 668 - RNA, 22 nt, Homo Sapiens
gaggagguggggcagcagcagg

SEQ ID NO: 669 - RNA, 22 nt, Homo Sapiens
cugggcucuggucuguagguuu

SEQ ID NO: 670 - RNA, 22 nt, Homo Sapiens
cugugagcuauuuguuuugguu

SEQ ID NO: 671 - RNA, 22 nt, Homo Sapiens
cugugcccagccagggcugugu

SEQ ID NO: 672 - RNA, 22 nt, Homo Sapiens
auaacugugaagaggcaauugu

SEQ ID NO: 673 - RNA, 22 nt, Homo Sapiens
auacugagagaaaaagcuuguc

SEQ ID NO: 674 - RNA, 22 nt, Homo Sapiens
auucaagauaagggucugggag

SEQ ID NO: 675 - RNA, 22 nt, Homo Sapiens
augggagacugaggggcggacg

SEQ ID NO: 676 - RNA, 22 nt, Homo Sapiens
aggggguuuagcuccacagggu

SEQ ID NO: 677 - RNA, 22 nt, Homo Sapiens
aggccagagaggacucucuuuu

SEQ ID NO: 678 - RNA, 22 nt, Homo Sapiens
uucuggugaauucaggauggua

SEQ ID NO: 679 - RNA, 22 nt, Homo Sapiens
uugcaaggaaggggaggaggcu

SEQ ID NO: 680 - RNA, 22 nt, Homo Sapiens
agguagggaggguagaugcucu

SEQ ID NO: 681 - RNA, 22 nt, Homo Sapiens
agagcuaggaagauacaggguu

SEQ ID NO: 682 - RNA, 22 nt, Homo Sapiens
agcuccaggagcuggcaggagg

SEQ ID NO: 683 - RNA, 22 nt, Homo Sapiens
auuuauuuucccucaaguaccu

SEQ ID NO: 684 - RNA, 22 nt, Homo Sapiens
ccuuguguuuuccagauucuga

SEQ ID NO: 685 - RNA, 22 nt, Homo Sapiens
ggccugaggucagcaguagagg

SEQ ID NO: 686 - RNA, 22 nt, Homo Sapiens
gugagaauggaggaagaacagu

SEQ ID NO: 687 - RNA, 22 nt, Homo Sapiens
gucuuccuccguccccaccucc

SEQ ID NO: 688 - RNA, 22 nt, Homo Sapiens
uccaaaaguggagaggaauaug

SEQ ID NO: 689 - RNA, 22 nt, Homo Sapiens
uuacaaaauuuggagggauugu

SEQ ID NO: 690 - RNA, 22 nt, Homo Sapiens
uggcucugugcuucuaguaucu

SEQ ID NO: 691 - RNA, 22 nt, Homo Sapiens
ucuuuuuguuguagcuguaugg

SEQ ID NO: 692 - RNA, 22 nt, Homo Sapiens
ugaaaugcuuuuaggacacugc

SEQ ID NO: 693 - RNA, 22 nt, Homo Sapiens
uaagaagagaaagaagaggcug

SEQ ID NO: 694 - RNA, 22 nt, Homo Sapiens
agcaagaugguagcauuggaga

SEQ ID NO: 695 - RNA, 22 nt, Homo Sapiens
uucugugcagguuaacauuucu

SEQ ID NO: 696 - RNA, 22 nt, Homo Sapiens
uuccugguggaggcauucggag

SEQ ID NO: 697 - RNA, 22 nt, Homo Sapiens
acacaucuaauggcugugcuga

SEQ ID NO: 698 - RNA, 22 nt, Homo Sapiens
cacacagucguguaguuuugcg

SEQ ID NO: 699 - RNA, 22 nt, Homo Sapiens
cuggcugcauuuaggaacaagg

SEQ ID NO: 700 - RNA, 22 nt, Homo Sapiens
guccuggagcuguuggagaaau

SEQ ID NO: 701 - RNA, 22 nt, Homo Sapiens
gcuucuccuguccccucccuac

SEQ ID NO: 702 - RNA, 22 nt, Homo Sapiens
ugugaaggaggaagggaggagc

SEQ ID NO: 703 - RNA, 22 nt, Homo Sapiens
uguaaacauccccgacuggaag

SEQ ID NO: 704 - RNA, 22 nt, Homo Sapiens
ugugagagaaauggcaaguugg

SEQ ID NO: 705 - RNA, 22 nt, Homo Sapiens
uggcucugucuauugggaugug

SEQ ID NO: 706 - RNA, 22 nt, Homo Sapiens
ugacuggaggaagggagguaag

SEQ ID NO: 707 - RNA, 22 nt, Homo Sapiens
ugcaugaugcugagguuuggga

SEQ ID NO: 708 - RNA, 22 nt, Homo Sapiens
gccucaguuguggccagggauu

SEQ ID NO: 709 - RNA, 22 nt, Homo Sapiens
gccuguaaucccagcuacuugg

SEQ ID NO: 710 - RNA, 22 nt, Homo Sapiens
gggggaucauuauaaaaauacu

SEQ ID NO: 711 - RNA, 22 nt, Homo Sapiens
gugagaauggaggaagaacagu

SEQ ID NO: 712 - RNA, 22 nt, Homo Sapiens
uacucauuuaugcauuguuuug

SEQ ID NO: 713 - RNA, 22 nt, Homo Sapiens
cugggauuacaggugugaacca

SEQ ID NO: 714 - RNA, 22 nt, Homo Sapiens
cucugccucccgggucuaggcu

SEQ ID NO: 715 - RNA, 22 nt, Homo Sapiens
cucugagucugagagaguaggu

SEQ ID NO: 716 - RNA, 22 nt, Homo Sapiens
cuggcuaauuuucuugaguuuu

SEQ ID NO: 717 - RNA, 22 nt, Homo Sapiens
gagguuugagccuucuccugcu

SEQ ID NO: 718 - RNA, 22 nt, Homo Sapiens
auuguaaauuaacaauuugcuc

SEQ ID NO: 719 - RNA, 22 nt, Homo Sapiens
aagcuggccuguaccugcugag

SEQ ID NO: 720 - RNA, 22 nt, Homo Sapiens
aaaggaguuugugacauugaca

SEQ ID NO: 721 - RNA, 22 nt, Homo Sapiens
augagaguaggaguuugggcuc

SEQ ID NO: 722 - RNA, 22 nt, Homo Sapiens
auaaagcuagacguucauugac

SEQ ID NO: 723 - RNA, 22 nt, Homo Sapiens
uuucauucauuucuuucaugga

SEQ ID NO: 724 - RNA, 22 nt, Homo Sapiens
uugugcuuguacugaccaugua

SEQ ID NO: 725 - RNA, 22 nt, Homo Sapiens
uucccuuaggucuggaauggua

SEQ ID NO: 726 - RNA, 22 nt, Homo Sapiens
uuuguaauagcaaaauacugga

SEQ ID NO: 727 - RNA, 22 nt, Homo Sapiens
aguuaugugaugcuuugaagca

SEQ ID NO: 728 - RNA, 22 nt, Homo Sapiens
aguaagcaaacucaguuuaauc

SEQ ID NO: 729 - RNA, 22 nt, Homo Sapiens
agggaguuuacauguuuucuaa

SEQ ID NO: 730 - RNA, 22 nt, Homo Sapiens
aggcuuuuggagaagcauaugc

SEQ ID NO: 731 - RNA, 22 nt, Homo Sapiens
aaaguggcuggaguggagucuu

SEQ ID NO: 732 - RNA, 22 nt, Homo Sapiens
aacugcuuuuguugugcaggga

SEQ ID NO: 733 - RNA, 22 nt, Homo Sapiens
aagcagaacuguuuuguuuucu

SEQ ID NO: 734 - RNA, 22 nt, Homo Sapiens
acagggcuaaggauguuugcug

SEQ ID NO: 735 - RNA, 22 nt, Homo Sapiens
caagugcuugaacauggcagag

SEQ ID NO: 736 - RNA, 22 nt, Homo Sapiens
cagugggaaaaguuugucucau

SEQ ID NO: 737 - RNA, 22 nt, Homo Sapiens
cccugggcugguguuugacuug

SEQ ID NO: 738 - RNA, 22 nt, Homo Sapiens
cauaucuccagguucugcugga

SEQ ID NO: 739 - RNA, 22 nt, Homo Sapiens
gaggaagguaaugaucuugauc

SEQ ID NO: 740 - RNA, 22 nt, Homo Sapiens
gaggagggcuuucccugacuuu

SEQ ID NO: 741 - RNA, 22 nt, Homo Sapiens
gagaugacugguggcugggggc

SEQ ID NO: 742 - RNA, 22 nt, Homo Sapiens
gaagcauugugagaaacagguu

SEQ ID NO: 743 - RNA, 22 nt, Homo Sapiens
gacaagaggcacagacagcagg

SEQ ID NO: 744 - RNA, 22 nt, Homo Sapiens
cucugccucccgggucuaggcu

SEQ ID NO: 745 - RNA, 22 nt, Homo Sapiens
uaggcagucucaguuguugggu

SEQ ID NO: 746 - RNA, 22 nt, Homo Sapiens
guggcaccauuggagucuaagg

SEQ ID NO: 747 - RNA, 22 nt, Homo Sapiens
ggcaaaaaaauagagcagaggg

SEQ ID NO: 748 - RNA, 21 nt, Homo Sapiens
gccuccauuucuacaucucua

SEQ ID NO: 749 - RNA, 22 nt, Homo Sapiens
ugaguauucaccaggugcuggg

SEQ ID NO: 750 - RNA, 22 nt, Homo Sapiens
ugagguuaguaguuugagacca

SEQ ID NO: 751 - RNA, 22 nt, Homo Sapiens
ucugccucccugucucacucuc

SEQ ID NO: 752 - RNA, 22 nt, Homo Sapiens
uccccaagccuuguaccagcgu

SEQ ID NO: 753 - RNA, 22 nt, Homo Sapiens
ugggaaaaaaggcaguuuagaa

SEQ ID NO: 754 - RNA, 21 nt, Homo Sapiens
ugugauaguucuuuuggaggc

SEQ ID NO: 755 - RNA, 22 nt, Homo Sapiens
uguguuggagcagaggcagggg

SEQ ID NO: 756 - RNA, 22 nt, Homo Sapiens
ugugaaggaggaagggaggagc

SEQ ID NO: 757 - RNA, 22 nt, Homo Sapiens
uguuaacauuuuggcuagauag

SEQ ID NO: 758 - RNA, 22 nt, Homo Sapiens
uggcaaagaaggcaguacaguu

SEQ ID NO: 759 - RNA, 22 nt, Homo Sapiens
ugaaaugcuuuuaggacacugc

SEQ ID NO: 760 - RNA, 22 nt, Homo Sapiens
ugagauggugucauauugcugg

SEQ ID NO: 761 - RNA, 22 nt, Homo Sapiens
ggaagaaugugcuuuuguuguu

SEQ ID NO: 762 - RNA, 22 nt, Homo Sapiens
gggggaucauuauaaaaauacu

SEQ ID NO: 763 - RNA, 22 nt, Homo Sapiens
guauguauuuauagauguucuu

SEQ ID NO: 764 - RNA, 22 nt, Homo Sapiens
uagggaaugaacaaauagaggc

SEQ ID NO: 765 - RNA, 22 nt, Homo Sapiens
cugccauuuccaggagaucacc

SEQ ID NO: 766 - RNA, 22 nt, Homo Sapiens
cugcagauuuugggguccacag

SEQ ID NO: 767 - RNA, 22 nt, Homo Sapiens
cuggcucccaggaggccucucu

SEQ ID NO: 768 - RNA, 22 nt, Homo Sapiens
ccguaaaauguucaaauguuuu

SEQ ID NO: 769 - RNA, 22 nt, Homo Sapiens
aguauuacagcagguacugguu

SEQ ID NO: 770 - RNA, 22 nt, Homo Sapiens
uuuuuaucuuuuucuccagaug

SEQ ID NO: 771 - RNA, 22 nt, Homo Sapiens
uugcccaggcuggagugcagug

SEQ ID NO: 772 - RNA, 22 nt, Homo Sapiens
uugcccaggcuagagugcagug

SEQ ID NO: 773 - RNA, 22 nt, Homo Sapiens
agugcagguucacaggcugggc

SEQ ID NO: 774 - RNA, 22 nt, Homo Sapiens
acauuuccaauguuuggggaca

SEQ ID NO: 775 - RNA, 22 nt, Homo Sapiens
ccccagucaaugcuucucucca

SEQ ID NO: 776 - RNA, 22 nt, Homo Sapiens
cugcugccuuucucucagagau

SEQ ID NO: 777 - RNA, 22 nt, Homo Sapiens
uagguugugcgcuccuuaugag

SEQ ID NO: 778 - RNA, 22 nt, Homo Sapiens
gugugggcagggccgugcuccc

SEQ ID NO: 779 - RNA, 22 nt, Homo Sapiens
ucuuggugcuuuugcuggauga

SEQ ID NO: 780 - RNA, 22 nt, Homo Sapiens
ucuggcuccugaguccuagcuc

SEQ ID NO: 781 - RNA, 22 nt, Homo Sapiens
ugcuaggcuuauucucuuccuc

SEQ ID NO: 782 - RNA, 22 nt, Homo Sapiens
uggagcagaaaggcaggagucc

SEQ ID NO: 783 - RNA, 22 nt, Homo Sapiens
uucagcauugccaguguuucca

SEQ ID NO: 784 - RNA, 22 nt, Homo Sapiens
ugguuaguuuuaugggccugga

SEQ ID NO: 785 - RNA, 22 nt, Homo Sapiens
ugugcugguugcccccgagggg

SEQ ID NO: 786 - RNA, 22 nt, Homo Sapiens
ugguggggagaggcuugggaag

SEQ ID NO: 787 - RNA, 22 nt, Homo Sapiens
ucuuggugcuuuugcuggauga

SEQ ID NO: 788 - RNA, 22 nt, Homo Sapiens
gucuggaggcuggaaccuggug

SEQ ID NO: 789 - RNA, 22 nt, Homo Sapiens
gguccacaaggggagagcaggg

SEQ ID NO: 790 - RNA, 22 nt, Homo Sapiens
ggagcuguaacagaucuguucu

SEQ ID NO: 791 - RNA, 20 nt, Homo Sapiens
acaggagcauggagaggcua

SEQ ID NO: 792 - RNA, 22 nt, Homo Sapiens
agugcagguucacaggcugggc

SEQ ID NO: 793 - RNA, 22 nt, Homo Sapiens
agauggaguugcaggugguccu

SEQ ID NO: 794 - RNA, 22 nt, Homo Sapiens
agcugagaaagcgaagaggugg

SEQ ID NO: 795 - RNA, 22 nt, Homo Sapiens
agagauaaagagguuuaggcag

SEQ ID NO: 796 - RNA, 22 nt, Homo Sapiens
aagucaccugaaaacucaacua

SEQ ID NO: 797 - RNA, 22 nt, Homo Sapiens
cugugagcuauuuguuuugguu

SEQ ID NO: 798 - RNA, 22 nt, Homo Sapiens
gacccuguguucaagguuaggg

SEQ ID NO: 799 - RNA, 22 nt, Homo Sapiens
gagguagagguugcagugaguc

SEQ ID NO: 800 - RNA, 22 nt, Homo Sapiens
cauaaaaucagaaaguauuacu

SEQ ID NO: 801 - RNA, 22 nt, Homo Sapiens
cacccucugccugugguugucu

SEQ ID NO: 802 - RNA, 22 nt, Homo Sapiens
ggaguaugagagagaaugggac

SEQ ID NO: 803 - RNA, 22 nt, Homo Sapiens
ggcaaggaagaaagcagaaguu

SEQ ID NO: 804 - RNA, 22 nt, Homo Sapiens
ggcaugugugagcagcugcagg

SEQ ID NO: 805 - RNA, 22 nt, Homo Sapiens
ggcugcagugaacuaugaucgu

SEQ ID NO: 806 - RNA, 22 nt, Homo Sapiens
ggaagaaugugcuuuuguuguu

SEQ ID NO: 807 - RNA, 22 nt, Homo Sapiens
gcaggugugcaaaucacaacuu

SEQ ID NO: 808 - RNA, 22 nt, Homo Sapiens
gucgggaggaaaagaaagaaga

SEQ ID NO: 809 - RNA, 22 nt, Homo Sapiens
guaacaaaaugaauaauaccug

SEQ ID NO: 810 - RNA, 22 nt, Homo Sapiens
guaaagaaaucauaaaagucca

SEQ ID NO: 811 - RNA, 22 nt, Homo Sapiens
ucccacagcuuccuagccacag

SEQ ID NO: 812 - RNA, 22 nt, Homo Sapiens
uccagggugggccucagacccu

SEQ ID NO: 813 - RNA, 22 nt, Homo Sapiens
ucccgugugaaaauuuguaugc

SEQ ID NO: 814 - RNA, 22 nt, Homo Sapiens
ugaaaugcuuuuaggacacugc

SEQ ID NO: 815 - RNA, 22 nt, Homo Sapiens
ugaguuuaagcuaagaagucug

SEQ ID NO: 816 - RNA, 22 nt, Homo Sapiens
uggaauugaguucccuggguuu

SEQ ID NO: 817 - RNA, 22 nt, Homo Sapiens
uugcaaggaaggggaggaggcu

SEQ ID NO: 818 - RNA, 22 nt, Homo Sapiens
uuugcagcuuccaaauuucuga

SEQ ID NO: 819 - RNA, 22 nt, Homo Sapiens
uggaggcaggugcagauggagg

SEQ ID NO: 820 - RNA, 22 nt, Homo Sapiens
uguguuggagcagaggcagggg

SEQ ID NO: 821 - RNA, 22 nt, Homo Sapiens
ugcgccccuguacucugggcaa

SEQ ID NO: 822 - RNA, 22 nt, Homo Sapiens
ucuggauuugagaggcuuuacu

SEQ ID NO: 823 - RNA, 22 nt, Homo Sapiens
guggcauuggugguggcauugg

SEQ ID NO: 824 - RNA, 22 nt, Homo Sapiens
guugggguuucaguggcaguca

SEQ ID NO: 825 - RNA, 22 nt, Homo Sapiens
ggaggcagugguugcagugagc

SEQ ID NO: 826 - RNA, 22 nt, Homo Sapiens
gcugcuccugcucucccucucc

SEQ ID NO: 827 - RNA, 22 nt, Homo Sapiens
gcuggguugagcugggcugaga

SEQ ID NO: 828 - RNA, 22 nt, Homo Sapiens
cggugcuguucaacagguccug

SEQ ID NO: 829 - RNA, 22 nt, Homo Sapiens
cauaucuccagguucugcugga

SEQ ID NO: 830 - RNA, 22 nt, Homo Sapiens
ccagccugagguuccuggaggg

SEQ ID NO: 831 - RNA, 22 nt, Homo Sapiens
ccacugcacuccagccugggug

SEQ ID NO: 832 - RNA, 22 nt, Homo Sapiens
ccaaagugcuaggauuacagcc

SEQ ID NO: 833 - RNA, 22 nt, Homo Sapiens
gagguuugagccuucuccugcu

SEQ ID NO: 834 - RNA, 22 nt, Homo Sapiens
gaggugaagaucuuggagucug

SEQ ID NO: 835 - RNA, 22 nt, Homo Sapiens
gagaggugaagccaggcuucug

SEQ ID NO: 836 - RNA, 22 nt, Homo Sapiens
gacaagaggcacagacagcagg

SEQ ID NO: 837 - RNA, 22 nt, Homo Sapiens
cuuggcccugugaggcuucacc

SEQ ID NO: 838 - RNA, 22 nt, Homo Sapiens
acacaggcccagagaggcagug

SEQ ID NO: 839 - RNA, 22 nt, Homo Sapiens
acugcacuccagccuggguggc

SEQ ID NO: 840 - RNA, 22 nt, Homo Sapiens
agugguuucagggacuucugua

SEQ ID NO: 841 - RNA, 22 nt, Homo Sapiens
cuggcucccucucuucucuccc

SEQ ID NO: 842 - RNA, 22 nt, Homo Sapiens
cugaauagaacagaagagcagc

SEQ ID NO: 843 - RNA, 22 nt, Homo Sapiens
gcugcuccugcucucccucucc

SEQ ID NO: 844 - RNA, 22 nt, Homo Sapiens
uguggcuuaggugagcauguga

SEQ ID NO: 845 - RNA, 22 nt, Homo Sapiens
uucaagaaagccaagauggcug

SEQ ID NO: 846 - RNA, 22 nt, Homo Sapiens
uguaaacaucccacacacucag

SEQ ID NO: 847 - RNA, 22 nt, Homo Sapiens
uggagccuuguuguuuguucac

SEQ ID NO: 848 - RNA, 22 nt, Homo Sapiens
ucugagcccaggaguuugaggc

SEQ ID NO: 849 - RNA, 22 nt, Homo Sapiens
gcagugaaggaggcaugugauc

SEQ ID NO: 850 - RNA, 22 nt, Homo Sapiens
guggcauuggugguggcauugg

SEQ ID NO: 851 - RNA, 22 nt, Homo Sapiens
guaaagaaaucauaaaagucca

SEQ ID NO: 852 - RNA, 22 nt, Homo Sapiens
uaggagugaaaauaaacucugu

SEQ ID NO: 853 - RNA, 22 nt, Homo Sapiens
uacaguucugguuucuucuuua

SEQ ID NO: 854 - RNA, 22 nt, Homo Sapiens
uaaguaaagagagaagccagaa

SEQ ID NO: 855 - RNA, 22 nt, Homo Sapiens
cugaauguaaucuuaguuguaa

SEQ ID NO: 856 - RNA, 22 nt, Homo Sapiens
cacacagucguguaguuuugcg

SEQ ID NO: 857 - RNA, 22 nt, Homo Sapiens
acugcagcuucagggacuugug

SEQ ID NO: 858 - RNA, 22 nt, Homo Sapiens
uuugcacacuuuccaaguugcc

SEQ ID NO: 859 - RNA, 22 nt, Homo Sapiens
uucuuuuuccgcuuucugagcc

SEQ ID NO: 860 - RNA, 22 nt, Homo Sapiens
uugugcuuguacugaccaugua

SEQ ID NO: 861 - RNA, 22 nt, Homo Sapiens
uugucagaggcugguagggugu

SEQ ID NO: 862 - RNA, 22 nt, Homo Sapiens
uucugccacugcauuccagccu

SEQ ID NO: 863 - RNA, 22 nt, Homo Sapiens
uuugcacuguaauaccucgguc

SEQ ID NO: 864 - RNA, 22 nt, Homo Sapiens
acacaggcccagagaggcagug

SEQ ID NO: 865 - RNA, 22 nt, Homo Sapiens
aaucccagcuacucgggaggcu

SEQ ID NO: 866 - RNA, 22 nt, Homo Sapiens
aaaggaguuugugacauugaca

SEQ ID NO: 867 - RNA, 22 nt, Homo Sapiens
agugcagguucacaggcugggc

SEQ ID NO: 868 - RNA, 22 nt, Homo Sapiens
agcugugagccugccuuccagu

SEQ ID NO: 869 - RNA, 22 nt, Homo Sapiens
aggcugagugacugggaguuag

SEQ ID NO: 870 - RNA, 22 nt, Homo Sapiens
aggcaagagguugcagugagcu

SEQ ID NO: 871 - RNA, 22 nt, Homo Sapiens
cacugcacuccagccuggguga

SEQ ID NO: 872 - RNA, 22 nt, Homo Sapiens
cacugcacuccagccugggcga

SEQ ID NO: 873 - RNA, 22 nt, Homo Sapiens
cacugcacuccagccuaggcaa

SEQ ID NO: 874 - RNA, 22 nt, Homo Sapiens
cacugcacucuagccucgguga

SEQ ID NO: 875 - RNA, 22 nt, Homo Sapiens
cacugcacuguagccuccuggg

SEQ ID NO: 876 - RNA, 22 nt, Homo Sapiens
ccacugcacuccagccugggug

SEQ ID NO: 877 - RNA, 22 nt, Homo Sapiens
ccacugcacuccagcacuccag

SEQ ID NO: 878 - RNA, 22 nt, Homo Sapiens
ccagccugagguuccuggaggg

SEQ ID NO: 879 - RNA, 22 nt, Homo Sapiens
cggcaagaugccggagugcugg

SEQ ID NO: 880 - RNA, 21 nt, Homo Sapiens
gacacaggcccagagaggcag

SEQ ID NO: 881 - RNA, 22 nt, Homo Sapiens
gccauugcacuccagccuggac

SEQ ID NO: 882 - RNA, 22 nt, Homo Sapiens
gccauugcacuccagccugggc

SEQ ID NO: 883 - RNA, 22 nt, Homo Sapiens
ggcugggcaugguggcucacgc

SEQ ID NO: 884 - RNA, 22 nt, Homo Sapiens
ugcaccacuacacuccuaggca

SEQ ID NO: 885 - RNA, 22 nt, Homo Sapiens
ugcaccacugcacucuaaccug

SEQ ID NO: 886 - RNA, 22 nt, Homo Sapiens
ugcaccacugcacuccagccug

SEQ ID NO: 887 - RNA, 22 nt, Homo Sapiens
ugagggggaaggugugugugug

SEQ ID NO: 888 - RNA, 22 nt, Homo Sapiens
uggaaagcauguacauuuggag

SEQ ID NO: 889 - RNA, 22 nt, Homo Sapiens
uguaaacuugucuugaauggaa

SEQ ID NO: 890 - RNA, 22 nt, Homo Sapiens
uggggcacuguggaggugucau

SEQ ID NO: 891 - RNA, 22 nt, Homo Sapiens
cuguccugugucagccugaaau

SEQ ID NO: 892 - RNA, 22 nt, Homo Sapiens
augggcaaauacugggagcugg

SEQ ID NO: 893 - RNA, 22 nt, Homo Sapiens
aagcuggccuguaccugcugag

SEQ ID NO: 894 - RNA, 22 nt, Homo Sapiens
aaucuccauuuguaaaugugac

SEQ ID NO: 895 - RNA, 22 nt, Homo Sapiens
acugcacuccauccugggacag

SEQ ID NO: 896 - RNA, 22 nt, Homo Sapiens
agcuccaggagcuggcaggagg

SEQ ID NO: 897 - RNA, 21 nt, Homo Sapiens
cuuuggcaagggagaagucac

SEQ ID NO: 898 - RNA, 22 nt, Homo Sapiens
ccaaagugcuggcguuacaggu

SEQ ID NO: 899 - RNA, 22 nt, Homo Sapiens
cacugcacuccagccugggcga

SEQ ID NO: 900 - RNA, 22 nt, Homo Sapiens
cacugcacuccagccuggguga

SEQ ID NO: 901 - RNA, 22 nt, Homo Sapiens
uggaagaauaggcaguauugga

SEQ ID NO: 902 - RNA, 22 nt, Homo Sapiens
uggagagaaagcgaagauguag

SEQ ID NO: 903 - RNA, 22 nt, Homo Sapiens
uggagagauaagccaaguaucc

SEQ ID NO: 904 - RNA, 22 nt, Homo Sapiens
uggagagagcagguugcuaaga

SEQ ID NO: 905 - RNA, 22 nt, Homo Sapiens
uucaggacugucuggauuuauu

SEQ ID NO: 906 - RNA, 22 nt, Homo Sapiens
ugcaaguugucuucuagggugu

SEQ ID NO: 907 - RNA, 22 nt, Homo Sapiens
uccaaagacucaacaguuagac

SEQ ID NO: 908 - RNA, 22 nt, Homo Sapiens
gguccacaaggggagagcaggg

SEQ ID NO: 909 - RNA, 22 nt, Homo Sapiens
gaguuaagcaaagagaggaaga

SEQ ID NO: 910 - RNA, 22 nt, Homo Sapiens
ucacugcaaccucugcuucugg

SEQ ID NO: 911 - RNA, 22 nt, Homo Sapiens
ucacccaguguaaacagcauga

SEQ ID NO: 912 - RNA, 22 nt, Homo Sapiens
uaaggcacugcuucuaaguagg

SEQ ID NO: 913 - RNA, 22 nt, Homo Sapiens
uagacugaggcuuccugcaggg

SEQ ID NO: 914 - RNA, 22 nt, Homo Sapiens
guccagugcucacugccgacau

SEQ ID NO: 915 - RNA, 22 nt, Homo Sapiens
guggcauuggugguggcauugg

SEQ ID NO: 916 - RNA, 22 nt, Homo Sapiens
gcaggcugguuggugaggcaaa

SEQ ID NO: 917 - RNA, 22 nt, Homo Sapiens
gcccaggagucugaggcuggag

SEQ ID NO: 918 - RNA, 22 nt, Homo Sapiens
gcagugaaggaggcaugugauc

SEQ ID NO: 919 - RNA, 22 nt, Homo Sapiens
gccuggaugugaccacccucac

SEQ ID NO: 920 - RNA, 22 nt, Homo Sapiens
gcugaauuuugacuccaucucc

SEQ ID NO: 921 - RNA, 22 nt, Homo Sapiens
gcuucuccuguccccucccuac

SEQ ID NO: 922 - RNA, 22 nt, Homo Sapiens
gcuguguuaacuguucaaacuc

SEQ ID NO: 923 - RNA, 22 nt, Homo Sapiens
ggaaaacaaguaccccuggaac

SEQ ID NO: 924 - RNA, 22 nt, Homo Sapiens
gggccaugacagggagauaggc

SEQ ID NO: 925 - RNA, 22 nt, Homo Sapiens
ggcccaggagggggagaaaggc

SEQ ID NO: 926 - RNA, 22 nt, Homo Sapiens
ggcaugauggagaggguggaga

SEQ ID NO: 927 - RNA, 22 nt, Homo Sapiens
ucccuuugaagccagguuccag

SEQ ID NO: 928 - RNA, 22 nt, Homo Sapiens
ucacuugccuagggucacacag

SEQ ID NO: 929 - RNA, 22 nt, Homo Sapiens
ucuggauuugagaggcuuuacu

SEQ ID NO: 930 - RNA, 22 nt, Homo Sapiens
ucugguuugagagacaaugaca

SEQ ID NO: 931 - RNA, 22 nt, Homo Sapiens
ucugucauuuuucucuuuccau

SEQ ID NO: 932 - RNA, 22 nt, Homo Sapiens
ugauggaggaaauggugguauc

SEQ ID NO: 933 - RNA, 22 nt, Homo Sapiens
ugagggaggaaguuugggauga

SEQ ID NO: 934 - RNA, 22 nt, Homo Sapiens
ugacuggaggaagggagguaag

SEQ ID NO: 935 - RNA, 22 nt, Homo Sapiens
ugagagaggaaggccguaggga

SEQ ID NO: 936 - RNA, 22 nt, Homo Sapiens
uucacccaucuuuccacccacg

SEQ ID NO: 937 - RNA, 21 nt, Homo Sapiens
uucacccaucuuuccacccac

SEQ ID NO: 938 - RNA, 22 nt, Homo Sapiens
ugugaaggaggaagggaggagc

SEQ ID NO: 939 - RNA, 22 nt, Homo Sapiens
ugucuucauccaggaaccacau

SEQ ID NO: 940 - RNA, 22 nt, Homo Sapiens
uguggcagaaggcucuggauua

SEQ ID NO: 941 - RNA, 22 nt, Homo Sapiens
uggagugucuggaggugucucu

SEQ ID NO: 942 - RNA, 22 nt, Homo Sapiens
ugguggggagaggcuugggaag

SEQ ID NO: 943 - RNA, 22 nt, Homo Sapiens
ugguccagaggaggaaugaggg

SEQ ID NO: 944 - RNA, 22 nt, Homo Sapiens
uggaaugacagaagaugagagc

SEQ ID NO: 945 - RNA, 22 nt, Homo Sapiens
uggauuaguaaagaagaaugaa

SEQ ID NO: 946 - RNA, 22 nt, Homo Sapiens
cacccucugccugugguugucu

SEQ ID NO: 947 - RNA, 22 nt, Homo Sapiens
ccagccugagguuccuggaggg

SEQ ID NO: 948 - RNA, 22 nt, Homo Sapiens
cuuuggccacggggauaugaau

SEQ ID NO: 949 - RNA, 22 nt, Homo Sapiens
cuuuuccugggucugggcugug

SEQ ID NO: 950 - RNA, 22 nt, Homo Sapiens
gagaugacugguggcugggggc

SEQ ID NO: 951 - RNA, 22 nt, Homo Sapiens
gaguacaaaugaagucuguggg

SEQ ID NO: 952 - RNA, 22 nt, Homo Sapiens
cugcccugaacucuggccaucc

SEQ ID NO: 953 - RNA, 22 nt, Homo Sapiens
cuuggcccugugaggcuucacc

SEQ ID NO: 954 - RNA, 22 nt, Homo Sapiens
aggcaagagguugcagugagcu

SEQ ID NO: 955 - RNA, 22 nt, Homo Sapiens
aggcagguggguguaugggucu

SEQ ID NO: 956 - RNA, 22 nt, Homo Sapiens
aggcugagugcaguggugugau

SEQ ID NO: 957 - RNA, 22 nt, Homo Sapiens
agguggaguuuugcuuucccau

SEQ ID NO: 958 - RNA, 22 nt, Homo Sapiens
accaucuucccuuucucgagua

SEQ ID NO: 959 - RNA, 22 nt, Homo Sapiens
acugcagcuucagggacuugug

SEQ ID NO: 960 - RNA, 22 nt, Homo Sapiens
aagguggugucauguuuugggg

SEQ ID NO: 961 - RNA, 22 nt, Homo Sapiens
aaaguguguuaucuagguaguc

SEQ ID NO: 962 - RNA, 22 nt, Homo Sapiens
aaaggcagacggugaaugccuu

SEQ ID NO: 963 - RNA, 22 nt, Homo Sapiens
aaugugcauggaucgcucagaa

SEQ ID NO: 964 - RNA, 22 nt, Homo Sapiens
acaaccucugccuccuggguuc

SEQ ID NO: 965 - RNA, 22 nt, Homo Sapiens
acugcacuccaaccaggcugac

SEQ ID NO: 966 - RNA, 22 nt, Homo Sapiens
aucacuauuaaugugugcuagu

SEQ ID NO: 967 - RNA, 22 nt, Homo Sapiens
auaccagcacaguggaugggga

SEQ ID NO: 968 - RNA, 22 nt, Homo Sapiens
agguagggaggguagaugcucu

SEQ ID NO: 969 - RNA, 22 nt, Homo Sapiens
aggccuuuuugggaagagacag

SEQ ID NO: 970 - RNA, 22 nt, Homo Sapiens
aggcaguaagggagaguuuugc

SEQ ID NO: 971 - RNA, 22 nt, Homo Sapiens
cuggcucccucucuucucuccc

SEQ ID NO: 972 - RNA, 22 nt, Homo Sapiens
cuggcugcauuuaggaacaagg

SEQ ID NO: 973 - RNA, 22 nt, Homo Sapiens
cuggaagacaugguagagcuga

SEQ ID NO: 974 - RNA, 22 nt, Homo Sapiens
cugaauagaacagaagagcagc

SEQ ID NO: 975 - RNA, 22 nt, Homo Sapiens
gagguagagguugcagugaguc

SEQ ID NO: 976 - RNA, 22 nt, Homo Sapiens
gagagagguagaggggagcaga

SEQ ID NO: 977 - RNA, 22 nt, Homo Sapiens
gagaaguaggaauaucaggagu

SEQ ID NO: 978 - RNA, 21 nt, Homo Sapiens
gacacaggcccagagaggcag

SEQ ID NO: 979 - RNA, 22 nt, Homo Sapiens
ccagccugagguuccuggaggg

SEQ ID NO: 980 - RNA, 22 nt, Homo Sapiens
ccccagucaaugcuucucucca

SEQ ID NO: 981 - RNA, 22 nt, Homo Sapiens
cacagcauuggucaugagguca

SEQ ID NO: 982 - RNA, 22 nt, Homo Sapiens
cagguggugcuguuaagaagca

SEQ ID NO: 983 - RNA, 22 nt, Homo Sapiens
cagagcugccuuucccuuccug

SEQ ID NO: 984 - RNA, 22 nt, Homo Sapiens
uggauuaguaaagaagaaugaa

SEQ ID NO: 985 - RNA, 22 nt, Homo Sapiens
ugggaggcuacacguuucucca

SEQ ID NO: 986 - RNA, 22 nt, Homo Sapiens
uggaggcaggugcagauggagg

SEQ ID NO: 987 - RNA, 22 nt, Homo Sapiens
uggagcagaaaggcaggagucc

SEQ ID NO: 988 - RNA, 22 nt, Homo Sapiens
uggaagaauaggcaguauugga

SEQ ID NO: 989 - RNA, 22 nt, Homo Sapiens
uucacaguggcugaagcuguuc

SEQ ID NO: 990 - RNA, 22 nt, Homo Sapiens
uuaacugagaggaucugaguag

SEQ ID NO: 991 - RNA, 22 nt, Homo Sapiens
uuaaagaucacuugacauggac

SEQ ID NO: 992 - RNA, 22 nt, Homo Sapiens
ugaaaagccuuuggguagugau

SEQ ID NO: 993 - RNA, 22 nt, Homo Sapiens
ugcaaguugucuucuagggugu

SEQ ID NO: 994 - RNA, 22 nt, Homo Sapiens
ugcagauacauguguaacugaa

SEQ ID NO: 995 - RNA, 22 nt, Homo Sapiens
ucugagcccaggaguuugaggc

SEQ ID NO: 996 - RNA, 22 nt, Homo Sapiens
ggcaugauggagaggguggaga

SEQ ID NO: 997 - RNA, 22 nt, Homo Sapiens
ggcagcugugcagagugggggu

SEQ ID NO: 998 - RNA, 22 nt, Homo Sapiens
gguccacaaggggagagcaggg

SEQ ID NO: 999 - RNA, 22 nt, Homo Sapiens
gucaccaggcagaauucagaua

SEQ ID NO: 1000 - RNA, 22 nt, Homo Sapiens
uagacugaggcuuccugcaggg

SEQ ID NO: 1001 - RNA, 22 nt, Homo Sapiens
uagcucauuuuugaaaucaguu

SEQ ID NO: 1002 - RNA, 22 nt, Homo Sapiens
uacaggcaggcacagaggcagu

SEQ ID NO: 1003 - RNA, 22 nt, Homo Sapiens
ucaaagcugcagauugccugug

SEQ ID NO: 1004 - RNA, 22 nt, Homo Sapiens
uuuguguccugacccagaggac

SEQ ID NO: 1005 - RNA, 22 nt, Homo Sapiens
uugucagaggcugguagggugu

SEQ ID NO: 1006 - RNA, 22 nt, Homo Sapiens
uuuggggucuccccagcaugca

SEQ ID NO: 1007 - RNA, 22 nt, Homo Sapiens
ucaacuaugauuaccaaagcag

SEQ ID NO: 1008 - RNA, 22 nt, Homo Sapiens
uagacugaggcuuccugcaggg

SEQ ID NO: 1009 - RNA, 22 nt, Homo Sapiens
uagcugccaggcaacaaguacg

SEQ ID NO: 1010 - RNA, 22 nt, Homo Sapiens
guaacaaaaugaauaauaccug

SEQ ID NO: 1011 - RNA, 22 nt, Homo Sapiens
ggcaccaucucagcucacugga

SEQ ID NO: 1012 - RNA, 22 nt, Homo Sapiens
uccuuuggacaugggcaagggu

SEQ ID NO: 1013 - RNA, 22 nt, Homo Sapiens
ugauucauuucuaaacccagcu

SEQ ID NO: 1014 - RNA, 22 nt, Homo Sapiens
ugauuguccaaacgcaauucuu

SEQ ID NO: 1015 - RNA, 22 nt, Homo Sapiens
ugagguuaguaguuugagacca

SEQ ID NO: 1016 - RNA, 21 nt, Homo Sapiens
ugagguaggugcugaaacugc

SEQ ID NO: 1017 - RNA, 22 nt, Homo Sapiens
ugagguaggugcugaaacugcu

SEQ ID NO: 1018 - RNA, 22 nt, Homo Sapiens
uguagugugaaaggcauagugu

SEQ ID NO: 1019 - RNA, 22 nt, Homo Sapiens
uggucucuugaaagaggcucuu

SEQ ID NO: 1020 - RNA, 22 nt, Homo Sapiens
uggcacagaucagcagaacagg

SEQ ID NO: 1021 - RNA, 22 nt, Homo Sapiens
ccugggggccacuuugcacagg

SEQ ID NO: 1022 - RNA, 22 nt, Homo Sapiens
gaccagccauccugguuuacau

SEQ ID NO: 1023 - RNA, 22 nt, Homo Sapiens
gaacagcuccagucuacagccc

SEQ ID NO: 1024 - RNA, 22 nt, Homo Sapiens
gagcagguuuggaauggcucca

SEQ ID NO: 1025 - RNA, 22 nt, Homo Sapiens
gauuccuccucuuuaaaauggu

SEQ ID NO: 1026 - RNA, 22 nt, Homo Sapiens
cugcacuagaaggcacuauguu

SEQ ID NO: 1027 - RNA, 22 nt, Homo Sapiens
agcugguguguagcggguaccu

SEQ ID NO: 1028 - RNA, 22 nt, Homo Sapiens
agcaaguguugaaacagcuggu

SEQ ID NO: 1029 - RNA, 22 nt, Homo Sapiens
accaucuucccuuucucgagua

SEQ ID NO: 1030 - RNA, 22 nt, Homo Sapiens
ugcagcagaccuuuugccuucu

SEQ ID NO: 1031 - RNA, 22 nt, Homo Sapiens
gcugcuccugcucucccucucc

SEQ ID NO: 1032 - RNA, 22 nt, Homo Sapiens
ggaagaaugugcuuuuguuguu

SEQ ID NO: 1033 - RNA, 22 nt, Homo Sapiens
ggaauggauggaagugugugag

SEQ ID NO: 1034 - RNA, 22 nt, Homo Sapiens
ggaggcagugguugcagugagc

SEQ ID NO: 1035 - RNA, 22 nt, Homo Sapiens
gcugcuccugcucucccucucc

SEQ ID NO: 1036 - RNA, 22 nt, Homo Sapiens
gccuguaaucccagcuacuugg

SEQ ID NO: 1037 - RNA, 22 nt, Homo Sapiens
gccauugcacuccagccuggac

SEQ ID NO: 1038 - RNA, 22 nt, Homo Sapiens
gccauugcacuccagccugggc

SEQ ID NO: 1039 - RNA, 22 nt, Homo Sapiens
gcacucaagccuggguuacaga

SEQ ID NO: 1040 - RNA, 22 nt, Homo Sapiens
ggcaaggaagaaagcagaaguu

SEQ ID NO: 1041 - RNA, 22 nt, Homo Sapiens
ggcugcagugaacuaugaucgu

SEQ ID NO: 1042 - RNA, 22 nt, Homo Sapiens
guacuccagccugccuggguaa

SEQ ID NO: 1043 - RNA, 22 nt, Homo Sapiens
uauugcacuccagccugggcaa

SEQ ID NO: 1044 - RNA, 22 nt, Homo Sapiens
uaguaguuagaggcugcaguga

SEQ ID NO: 1045 - RNA, 22 nt, Homo Sapiens
ugcaccacugcacucuaaccug

SEQ ID NO: 1046 - RNA, 22 nt, Homo Sapiens
ugcaccaaugcacuccagccug

SEQ ID NO: 1047 - RNA, 22 nt, Homo Sapiens
ugcaccacugcacuccagccug

SEQ ID NO: 1048 - RNA, 22 nt, Homo Sapiens
ugaguguaugugugagagagaa

SEQ ID NO: 1049 - RNA, 22 nt, Homo Sapiens
ugcaagucugugauuuuguguu

SEQ ID NO: 1050 - RNA, 22 nt, Homo Sapiens
ugagaucaucguuacaagcagc

SEQ ID NO: 1051 - RNA, 22 nt, Homo Sapiens
uccauugcacuccagucugggc

SEQ ID NO: 1052 - RNA, 22 nt, Homo Sapiens
ucauccuuuucugcaaccuguu

SEQ ID NO: 1053 - RNA, 22 nt, Homo Sapiens
ucuuugaucucuuccggggcuu

SEQ ID NO: 1054 - RNA, 22 nt, Homo Sapiens
uggcuguuugggguugccgugu

SEQ ID NO: 1055 - RNA, 22 nt, Homo Sapiens
ugucuggaggcgcaguuuucag

SEQ ID NO: 1056 - RNA, 22 nt, Homo Sapiens
ugugccacugcacuccaugggu

SEQ ID NO: 1057 - RNA, 22 nt, Homo Sapiens
acugcacuccaaccaggcugac

SEQ ID NO: 1058 - RNA, 22 nt, Homo Sapiens
acugcacuccagccuaugggau

SEQ ID NO: 1059 - RNA, 22 nt, Homo Sapiens
accugcauuccagccugcugac

SEQ ID NO: 1060 - RNA, 22 nt, Homo Sapiens
acugcacuccauccugggacag

SEQ ID NO: 1061 - RNA, 22 nt, Homo Sapiens
acugcacuccauccugagugac

SEQ ID NO: 1062 - RNA, 22 nt, Homo Sapiens
acugcacuccagucugggugac

SEQ ID NO: 1063 - RNA, 22 nt, Homo Sapiens
acugcacuccagccuguugaca

SEQ ID NO: 1064 - RNA, 22 nt, Homo Sapiens
acugcacuccagucuaggugac

SEQ ID NO: 1065 - RNA, 22 nt, Homo Sapiens
acugcacuccagccuggguggc

SEQ ID NO: 1066 - RNA, 22 nt, Homo Sapiens
acugcacuccagccugggugac

SEQ ID NO: 1067 - RNA, 22 nt, Homo Sapiens
acugcacuccagccugggugau

SEQ ID NO: 1068 - RNA, 22 nt, Homo Sapiens
acugcacuccagccugggcgau

SEQ ID NO: 1069 - RNA, 22 nt, Homo Sapiens
acugcacuccagccuggcgaca

SEQ ID NO: 1070 - RNA, 22 nt, Homo Sapiens
acugcacucuagccugagcaac

SEQ ID NO: 1071 - RNA, 22 nt, Homo Sapiens
acugcacuucagccugggcaau

SEQ ID NO: 1072 - RNA, 22 nt, Homo Sapiens
acugcacucuagccugggcaac

SEQ ID NO: 1073 - RNA, 22 nt, Homo Sapiens
acugcacuccauccuggggagc

SEQ ID NO: 1074 - RNA, 22 nt, Homo Sapiens
acugcacuccugccuaggugac

SEQ ID NO: 1075 - RNA, 22 nt, Homo Sapiens
acugcacuccugccugggugac

SEQ ID NO: 1076 - RNA, 22 nt, Homo Sapiens
acugcacucuagccuaggugau

SEQ ID NO: 1077 - RNA, 22 nt, Homo Sapiens
acuguacuccacccugggcgac

SEQ ID NO: 1078 - RNA, 22 nt, Homo Sapiens
acuguacuccagccugggcaac

SEQ ID NO: 1079 - RNA, 22 nt, Homo Sapiens
acuguacuucagccugggcaac

SEQ ID NO: 1080 - RNA, 22 nt, Homo Sapiens
acuguacuccagccuaggcaac

SEQ ID NO: 1081 - RNA, 22 nt, Homo Sapiens
acuguacuccagccugggugac

SEQ ID NO: 1082 - RNA, 22 nt, Homo Sapiens
acuguacuucagccuggguaac

SEQ ID NO: 1083 - RNA, 22 nt, Homo Sapiens
acagcaguccagccugggugac

SEQ ID NO: 1084 - RNA, 22 nt, Homo Sapiens
aaucccagcuacucgggaggcu

SEQ ID NO: 1085 - RNA, 22 nt, Homo Sapiens
aaauccuggggaucuggaggga

SEQ ID NO: 1086 - RNA, 22 nt, Homo Sapiens
agauaguucucuguuguugggg

SEQ ID NO: 1087 - RNA, 22 nt, Homo Sapiens
aggcaagagguugcagugagcu

SEQ ID NO: 1088 - RNA, 22 nt, Homo Sapiens
agugagcuaugaucaugccggu

SEQ ID NO: 1089 - RNA, 22 nt, Homo Sapiens
auugcacuucagccugggugac

SEQ ID NO: 1090 - RNA, 22 nt, Homo Sapiens
auugcacuccagcuugggcaac

SEQ ID NO: 1091 - RNA, 22 nt, Homo Sapiens
auugcacuccagccugggugac

SEQ ID NO: 1092 - RNA, 22 nt, Homo Sapiens
auugcacuccagccugggcaau

SEQ ID NO: 1093 - RNA, 22 nt, Homo Sapiens
auggccuuuucucuuauccugg

SEQ ID NO: 1094 - RNA, 22 nt, Homo Sapiens
cucagauacuugggagguugag

SEQ ID NO: 1095 - RNA, 22 nt, Homo Sapiens
cugggcgugugaggcggcugug

SEQ ID NO: 1096 - RNA, 22 nt, Homo Sapiens
cuugcacuccacagccugggug

SEQ ID NO: 1097 - RNA, 22 nt, Homo Sapiens
gagguagagguugcagugagug

SEQ ID NO: 1098 - RNA, 22 nt, Homo Sapiens
gaggagguggggcagcagcagg

SEQ ID NO: 1099 - RNA, 22 nt, Homo Sapiens
gagguagagguugcagugaguc

SEQ ID NO: 1100 - RNA, 22 nt, Homo Sapiens
cguguaaucccagcuacuuggg

SEQ ID NO: 1101 - RNA, 22 nt, Homo Sapiens
ccacugcacuccagcacuccag

SEQ ID NO: 1102 - RNA, 22 nt, Homo Sapiens
ccacugcacuccagccugggug

SEQ ID NO: 1103 - RNA, 22 nt, Homo Sapiens
cauugcacuccagccuggguga

SEQ ID NO: 1104 - RNA, 22 nt, Homo Sapiens
cauugcacuccacccuaggcaa

SEQ ID NO: 1105 - RNA, 22 nt, Homo Sapiens
cauugcacuccagccuaggcaa

SEQ ID NO: 1106 - RNA, 22 nt, Homo Sapiens
cacugcacuccagccuggguga

SEQ ID NO: 1107 - RNA, 22 nt, Homo Sapiens
cacugcacuccagccuggguaa

SEQ ID NO: 1108 - RNA, 22 nt, Homo Sapiens
cacugcacuccagccugggcga

SEQ ID NO: 1109 - RNA, 22 nt, Homo Sapiens
cacugcacuccagccuaggcaa

SEQ ID NO: 1110 - RNA, 22 nt, Homo Sapiens
cacugcacuguagccuccuggg

SEQ ID NO: 1111 - RNA, 22 nt, Homo Sapiens
cacugcacucuagccucgguga

SEQ ID NO: 1112 - RNA, 22 nt, Homo Sapiens
cacugcacuccaaccuggacaa

SEQ ID NO: 1113 - RNA, 22 nt, Homo Sapiens
cacugcacuccacccugggcaa

SEQ ID NO: 1114 - RNA, 22 nt, Homo Sapiens
cacugcacuccagcccggcaac

SEQ ID NO: 1115 - RNA, 22 nt, Homo Sapiens
cacugcacucagccugggugac

SEQ ID NO: 1116 - RNA, 22 nt, Homo Sapiens
auuguucuccagccugggcgac

SEQ ID NO: 1117 - RNA, 22 nt, Homo Sapiens
uucugccacugcauuccagccu

SEQ ID NO: 1118 - RNA, 22 nt, Homo Sapiens
uugcacuccagucugggugaca

SEQ ID NO: 1119 - RNA, 22 nt, Homo Sapiens
uugcacuccagccugggugaca

SEQ ID NO: 1120 - RNA, 22 nt, Homo Sapiens
uugcacuccagccuggguaaca

SEQ ID NO: 1121 - RNA, 22 nt, Homo Sapiens
uuccuucugcauugugagaaaa

SEQ ID NO: 1122 - RNA, 22 nt, Homo Sapiens
uugcccaggcuggagugcagug

SEQ ID NO: 1123 - RNA, 22 nt, Homo Sapiens
cacccaggcuggagugcagugg

SEQ ID NO: 1124 - RNA, 22 nt, Homo Sapiens
cgacucuugaccauggcugggg

SEQ ID NO: 1125 - RNA, 22 nt, Homo Sapiens
ccuccuuucaucaaauucgagu

SEQ ID NO: 1126 - RNA, 22 nt, Homo Sapiens
ccaggguacucugggaucacuu

SEQ ID NO: 1127 - RNA, 22 nt, Homo Sapiens
cccaggcuggagugcaguggug

SEQ ID NO: 1128 - RNA, 21 nt, Homo Sapiens
cuuuggcaagggagaagucac

SEQ ID NO: 1129 - RNA, 22 nt, Homo Sapiens
cuucuuuggggugggcuugcuc

SEQ ID NO: 1130 - RNA, 22 nt, Homo Sapiens
cuggcucccucucuucucuccc

SEQ ID NO: 1131 - RNA, 22 nt, Homo Sapiens
cugcugccuuucucucagagau

SEQ ID NO: 1132 - RNA, 22 nt, Homo Sapiens
augcccuuccucuucugccaug

SEQ ID NO: 1133 - RNA, 22 nt, Homo Sapiens
aaccugucauuccaaggacagu

SEQ ID NO: 1134 - RNA, 22 nt, Homo Sapiens
agaaguguaaauaaguauguau

SEQ ID NO: 1135 - RNA, 22 nt, Homo Sapiens
ugugacacguucauucugcaag

SEQ ID NO: 1136 - RNA, 22 nt, Homo Sapiens
uggaauggcugaagacugugaa

SEQ ID NO: 1137 - RNA, 22 nt, Homo Sapiens
ucugguuuuaauccugaaggca

SEQ ID NO: 1138 - RNA, 22 nt, Homo Sapiens
ucacuguuccuuuuuguugaga

SEQ ID NO: 1139 - RNA, 22 nt, Homo Sapiens
ucagucguuucucucucccagc

SEQ ID NO: 1140 - RNA, 22 nt, Homo Sapiens
uccauugcacuccagucugggc

SEQ ID NO: 1141 - RNA, 22 nt, Homo Sapiens
ugagaugaaccagguaucucag

SEQ ID NO: 1142 - RNA, 22 nt, Homo Sapiens
ugaaaugcuuuuaggacacugc

SEQ ID NO: 1143 - RNA, 22 nt, Homo Sapiens
ugagguaggugcugaaacugcu

SEQ ID NO: 1144 - RNA, 21 nt, Homo Sapiens
ugagguaggugcugaaacugc

SEQ ID NO: 1145 - RNA, 22 nt, Homo Sapiens
ugagggaggaaguuugggauga

SEQ ID NO: 1146 - RNA, 22 nt, Homo Sapiens
uaugucacuccuuugcccagac

SEQ ID NO: 1147 - RNA, 22 nt, Homo Sapiens
ucacccaggcuggagugcagug

SEQ ID NO: 1148 - RNA, 22 nt, Homo Sapiens
gucugcugucuacacuacacac

SEQ ID NO: 1149 - RNA, 22 nt, Homo Sapiens
guauguguggguuucucagccu

SEQ ID NO: 1150 - RNA, 22 nt, Homo Sapiens
guggccuuucuggucuguguau

SEQ ID NO: 1151 - RNA, 22 nt, Homo Sapiens
guguuuuuccaaaugacaucca

SEQ ID NO: 1152 - RNA, 22 nt, Homo Sapiens
gcccuguugaccagaauuuguu

SEQ ID NO: 1153 - RNA, 22 nt, Homo Sapiens
ggcccaggagggggagaaaggc

SEQ ID NO: 1154 - RNA, 22 nt, Homo Sapiens
uaagaagagaaagaagaggcug

SEQ ID NO: 1155 - RNA, 22 nt, Homo Sapiens
gugugugauaaggacacagaua

SEQ ID NO: 1156 - RNA, 22 nt, Homo Sapiens
gucacugcaaucaacaauacuc

SEQ ID NO: 1157 - RNA, 22 nt, Homo Sapiens
uagugcaguugaaugaacauuu

SEQ ID NO: 1158 - RNA, 22 nt, Homo Sapiens
uacagcucugcuucuggcucac

SEQ ID NO: 1159 - RNA, 22 nt, Homo Sapiens
ugaaagagaugggacagugacu

SEQ ID NO: 1160 - RNA, 22 nt, Homo Sapiens
ugcuuuaguucuucugaagugu

SEQ ID NO: 1161 - RNA, 22 nt, Homo Sapiens
uguguaaugcugagauuugggc

SEQ ID NO: 1162 - RNA, 22 nt, Homo Sapiens
uuagaaagaauauugccagucc

SEQ ID NO: 1163 - RNA, 22 nt, Homo Sapiens
aguaagcaaacucaguuuaauc

SEQ ID NO: 1164 - RNA, 22 nt, Homo Sapiens
agguggcacugugugggguggg

SEQ ID NO: 1165 - RNA, 22 nt, Homo Sapiens
aggcagguggguguaugggucu

SEQ ID NO: 1166 - RNA, 22 nt, Homo Sapiens
agagacacagacacaugggaga

SEQ ID NO: 1167 - RNA, 22 nt, Homo Sapiens
agcugccaguugaagaacauuu

SEQ ID NO: 1168 - RNA, 22 nt, Homo Sapiens
cuggagaggagcggucacuggu

SEQ ID NO: 1169 - RNA, 22 nt, Homo Sapiens
cuugcacuccacagccugggug

SEQ ID NO: 1170 - RNA, 22 nt, Homo Sapiens
gaggucacuguuggaugucaga

SEQ ID NO: 1171 - RNA, 22 nt, Homo Sapiens
auuuggggaaauguguuucugg

SEQ ID NO: 1172 - RNA, 22 nt, Homo Sapiens
cacugcaaugacugucagaaca

SEQ ID NO: 1173 - RNA, 22 nt, Homo Sapiens
uuccuucaguucagggaacccu

SEQ ID NO: 1174 - RNA, 22 nt, Homo Sapiens
uugagcacaguuugaggagugu

SEQ ID NO: 1175 - RNA, 22 nt, Homo Sapiens
uuucauucauuucuuucaugga

SEQ ID NO: 1176 - RNA, 22 nt, Homo Sapiens
cacccaggcuggagugcagugg

SEQ ID NO: 1177 - RNA, 22 nt, Homo Sapiens
cccaggcuggagugcaguggug

SEQ ID NO: 1178 - RNA, 22 nt, Homo Sapiens
cuacuuguuccucucaccucaa

SEQ ID NO: 1179 - RNA, 22 nt, Homo Sapiens
cuccuaggcuggagugcagugg

SEQ ID NO: 1180 - RNA, 22 nt, Homo Sapiens
aggcugagugcaguggugugau

SEQ ID NO: 1181 - RNA, 22 nt, Homo Sapiens
aggcugcaguguaguggcauga

SEQ ID NO: 1182 - RNA, 22 nt, Homo Sapiens
augaugcuggaacuggacaaca

SEQ ID NO: 1183 - RNA, 22 nt, Homo Sapiens
auuagcuauagcaaaaggcuua

SEQ ID NO: 1184 - RNA, 22 nt, Homo Sapiens
acugcacuccagucugggugac

SEQ ID NO: 1185 - RNA, 22 nt, Homo Sapiens
uuaaugcuaaucgugauagggg

SEQ ID NO: 1186 - RNA, 22 nt, Homo Sapiens
uucaggacugucuggauuuauu

SEQ ID NO: 1187 - RNA, 22 nt, Homo Sapiens
uggagcagaaaggcaggagucc

SEQ ID NO: 1188 - RNA, 22 nt, Homo Sapiens
ugagggcaggugugaaaaugcu

SEQ ID NO: 1189 - RNA, 22 nt, Homo Sapiens
ugcaagucugugauuuuguguu

SEQ ID NO: 1190 - RNA, 22 nt, Homo Sapiens
ugcagccuugaacucuuucugg

SEQ ID NO: 1191 - RNA, 22 nt, Homo Sapiens
ucacuguuccuuuuuguugaga

SEQ ID NO: 1192 - RNA, 22 nt, Homo Sapiens
ucauccuuuucugcaaccuguu

SEQ ID NO: 1193 - RNA, 22 nt, Homo Sapiens
gugcauuuguaguuaaaugugu

SEQ ID NO: 1194 - RNA, 22 nt, Homo Sapiens
guacaguggguguagggaccag

SEQ ID NO: 1195 - RNA, 22 nt, Homo Sapiens
guaaggcuggcauuagggugag

SEQ ID NO: 1196 - RNA, 22 nt, Homo Sapiens
gggcgugaugucagccagaguc

SEQ ID NO: 1197 - RNA, 22 nt, Homo Sapiens
guuacagcucucaaagaagaca

SEQ ID NO: 1198 - RNA, 22 nt, Homo Sapiens
uaaggacgcaaagagggcaagg

SEQ ID NO: 1199 - RNA, 22 nt, Homo Sapiens
ugacagagguacauaggaggcu

SEQ ID NO: 1200 - RNA, 22 nt, Homo Sapiens
agcaaaagccaugcccaggaga

SEQ ID NO: 1201 - RNA, 22 nt, Homo Sapiens
agcuccaggagcuggcaggagg

SEQ ID NO: 1202 - RNA, 22 nt, Homo Sapiens
aggccuuuuugggaagagacag

SEQ ID NO: 1203 - RNA, 22 nt, Homo Sapiens
agucagacguuuggcaacagca

SEQ ID NO: 1204 - RNA, 22 nt, Homo Sapiens
aaaggcagacggugaaugccuu

SEQ ID NO: 1205 - RNA, 22 nt, Homo Sapiens
aaucccagcuacucgggaggcu

SEQ ID NO: 1206 - RNA, 22 nt, Homo Sapiens
aagugcugggauuacaggccug

SEQ ID NO: 1207 - RNA, 22 nt, Homo Sapiens
cuggcucccucucuucucuccc

SEQ ID NO: 1208 - RNA, 22 nt, Homo Sapiens
gauggcagcuggagguggagca

SEQ ID NO: 1209 - RNA, 22 nt, Homo Sapiens
gaggagguggggcagcagcagg

SEQ ID NO: 1210 - RNA, 22 nt, Homo Sapiens
gacccuguguucaagguuaggg

SEQ ID NO: 1211 - RNA, 22 nt, Homo Sapiens
gagagagguagaggggagcaga

SEQ ID NO: 1212 - RNA, 22 nt, Homo Sapiens
cguguaaucccagcuacuuggg

SEQ ID NO: 1213 - RNA, 22 nt, Homo Sapiens
ccucuccauguacccauucccc

SEQ ID NO: 1214 - RNA, 22 nt, Homo Sapiens
ccaaagugcuggcguuacaggu

SEQ ID NO: 1215 - RNA, 22 nt, Homo Sapiens
ccaaagugcugggauuacaggc

SEQ ID NO: 1216 - RNA, 22 nt, Homo Sapiens
ccagccugagguuccuggaggg

SEQ ID NO: 1217 - RNA, 22 nt, Homo Sapiens
caaagugcugagauuacaggca

SEQ ID NO: 1218 - RNA, 22 nt, Homo Sapiens
auugcuugagcccaggaguuca

SEQ ID NO: 1219 - RNA, 22 nt, Homo Sapiens
ugcaugaugcugagguuuggga

SEQ ID NO: 1220 - RNA, 22 nt, Homo Sapiens
ugaggugaucagcaagguggag

SEQ ID NO: 1221 - RNA, 22 nt, Homo Sapiens
ucagucguuucucucucccagc

SEQ ID NO: 1222 - RNA, 22 nt, Homo Sapiens
uccccaagccuuguaccagcgu

SEQ ID NO: 1223 - RNA, 22 nt, Homo Sapiens
ucugagcccaggaguuugaggc

SEQ ID NO: 1224 - RNA, 22 nt, Homo Sapiens
ucugcuuggacugaucauugaa

SEQ ID NO: 1225 - RNA, 22 nt, Homo Sapiens
ucucaguuuccucugcaaacag

SEQ ID NO: 1226 - RNA, 22 nt, Homo Sapiens
uggcucaguuugcucagcagug

SEQ ID NO: 1227 - RNA, 22 nt, Homo Sapiens
ugguccagaggaggaaugaggg

SEQ ID NO: 1228 - RNA, 22 nt, Homo Sapiens
uucacauguugcucaguuuugc

SEQ ID NO: 1229 - RNA, 22 nt, Homo Sapiens
uucaguucuugaccugccccag

SEQ ID NO: 1230 - RNA, 22 nt, Homo Sapiens
uguguuggagcagaggcagggg

SEQ ID NO: 1231 - RNA, 22 nt, Homo Sapiens
ugucuggaggcgcaguuuucag

SEQ ID NO: 1232 - RNA, 22 nt, Homo Sapiens
uagcagcaggagcagguaacau

SEQ ID NO: 1233 - RNA, 22 nt, Homo Sapiens
uaucgcuugagcccaggaguuu

SEQ ID NO: 1234 - RNA, 22 nt, Homo Sapiens
gugugggcagggccgugcuccc

SEQ ID NO: 1235 - RNA, 22 nt, Homo Sapiens
gguccacaaggggagagcaggg

SEQ ID NO: 1236 - RNA, 22 nt, Homo Sapiens
ggccucagaagcugaggggaga

SEQ ID NO: 1237 - RNA, 22 nt, Homo Sapiens
ggcugggcaugguggcucacgc

SEQ ID NO: 1238 - RNA, 22 nt, Homo Sapiens
ggcuggagaguaaaucaggucu

SEQ ID NO: 1239 - RNA, 22 nt, Homo Sapiens
ggcccaggagggggagaaaggc

SEQ ID NO: 1240 - RNA, 22 nt, Homo Sapiens
ggcaugauucagcagaggagag

SEQ ID NO: 1241 - RNA, 21 nt, Homo Sapiens
gccuccauuucuacaucucua

SEQ ID NO: 1242 - RNA, 22 nt, Homo Sapiens
gccuguaaucccagcuacuugg

SEQ ID NO: 1243 - RNA, 22 nt, Homo Sapiens
gcccaggagucugaggcuggag

SEQ ID NO: 1244 - RNA, 22 nt, Homo Sapiens
gauugcuugagcccuggagguu

SEQ ID NO: 1245 - RNA, 22 nt, Homo Sapiens
gcagcaggcagggccaggcagg

SEQ ID NO: 1246 - RNA, 22 nt, Homo Sapiens
gcugcuccugcucucccucucc

SEQ ID NO: 1247 - RNA, 22 nt, Homo Sapiens
gccuuuccuccagaacugcucc

SEQ ID NO: 1248 - RNA, 22 nt, Homo Sapiens
uuuacagauggcaaagaucugg

SEQ ID NO: 1249 - RNA, 22 nt, Homo Sapiens
uuugaaguggguccucgaaaug

SEQ ID NO: 1250 - RNA, 22 nt, Homo Sapiens
uucccucauucuccacccaguc

SEQ ID NO: 1251 - RNA, 22 nt, Homo Sapiens
uuuggucuaaucuucaagagga

SEQ ID NO: 1252 - RNA, 22 nt, Homo Sapiens
uuuguaauagcaaaauacugga

SEQ ID NO: 1253 - RNA, 22 nt, Homo Sapiens
uugcaaggaaggggaggaggcu

SEQ ID NO: 1254 - RNA, 22 nt, Homo Sapiens
uuugaugcaugugaccugggau

SEQ ID NO: 1255 - RNA, 22 nt, Homo Sapiens
uuucauucauuucuuucaugga

SEQ ID NO: 1256 - RNA, 22 nt, Homo Sapiens
uugcuuugguucaaguuaggca

SEQ ID NO: 1257 - RNA, 22 nt, Homo Sapiens
gcuucuccuguccccucccuac

SEQ ID NO: 1258 - RNA, 22 nt, Homo Sapiens
ggaggaggaggcuggugcuggu

SEQ ID NO: 1259 - RNA, 22 nt, Homo Sapiens
gcaggcugguuggugaggcaaa

SEQ ID NO: 1260 - RNA, 22 nt, Homo Sapiens
ggcaugauggagaggguggaga

SEQ ID NO: 1261 - RNA, 22 nt, Homo Sapiens
ggaggaggugugaagaaaugaa

SEQ ID NO: 1262 - RNA, 22 nt, Homo Sapiens
ggcacugagaagcaaacaggau

SEQ ID NO: 1263 - RNA, 22 nt, Homo Sapiens
ggcuggagaguaaaucaggucu

SEQ ID NO: 1264 - RNA, 22 nt, Homo Sapiens
gggaggauccuugcucaacuua

SEQ ID NO: 1265 - RNA, 22 nt, Homo Sapiens
gguucaauucaccggagucuca

SEQ ID NO: 1266 - RNA, 22 nt, Homo Sapiens
guccagugcucacugccgacau

SEQ ID NO: 1267 - RNA, 22 nt, Homo Sapiens
uaagcagucuuucuucuucuuc

SEQ ID NO: 1268 - RNA, 22 nt, Homo Sapiens
uguuauuuuguccaagagagag

SEQ ID NO: 1269 - RNA, 22 nt, Homo Sapiens
uucaagaaagccaagauggcug

SEQ ID NO: 1270 - RNA, 22 nt, Homo Sapiens
uccuuaggaccuagagguagua

SEQ ID NO: 1271 - RNA, 22 nt, Homo Sapiens
ucuuugcuggaaggugccuccc

SEQ ID NO: 1272 - RNA, 22 nt, Homo Sapiens
ucccacagcuuccuagccacag

SEQ ID NO: 1273 - RNA, 22 nt, Homo Sapiens
cagagaauggcacagcuguccu

SEQ ID NO: 1274 - RNA, 22 nt, Homo Sapiens
caggugcaaguguuaaagggua

SEQ ID NO: 1275 - RNA, 22 nt, Homo Sapiens
ccuggagugacagguguagccu

SEQ ID NO: 1276 - RNA, 22 nt, Homo Sapiens
cuggcucccucucuucucuccc

SEQ ID NO: 1277 - RNA, 22 nt, Homo Sapiens
cucugagucugagagaguaggu

SEQ ID NO: 1278 - RNA, 22 nt, Homo Sapiens
aagugcugguauuacaagugug

SEQ ID NO: 1279 - RNA, 22 nt, Homo Sapiens
aggugggguuucaccauguugg

SEQ ID NO: 1280 - RNA, 22 nt, Homo Sapiens
aggcagguggguguaugggucu

SEQ ID NO: 1281 - RNA, 22 nt, Homo Sapiens
agcagcucaagucuucuccaga

SEQ ID NO: 1282 - RNA, 22 nt, Homo Sapiens
agagcuaggaagauacaggguu

SEQ ID NO: 1283 - RNA, 22 nt, Homo Sapiens
caugguacugccacagaagagu

SEQ ID NO: 1284 - RNA, 22 nt, Homo Sapiens
ugggcucauuuugcagugauuu

SEQ ID NO: 1285 - RNA, 22 nt, Homo Sapiens
uaauuuccugguagugaugaca

SEQ ID NO: 1286 - RNA, 22 nt, Homo Sapiens
uaggagugaaaauaaacucugu

SEQ ID NO: 1287 - RNA, 22 nt, Homo Sapiens
uaggaaguauuuuuuaaaaaca

SEQ ID NO: 1288 - RNA, 22 nt, Homo Sapiens
uaugaauguaaggaauguggga

SEQ ID NO: 1289 - RNA, 22 nt, Homo Sapiens
uagugcaagguuuugccaacuu

SEQ ID NO: 1290 - RNA, 22 nt, Homo Sapiens
gugcauuuguaguuaaaugugu

SEQ ID NO: 1291 - RNA, 22 nt, Homo Sapiens
gguucucaaaugagggacauuu

SEQ ID NO: 1292 - RNA, 22 nt, Homo Sapiens
uaagaagagaaagaagaggcug

SEQ ID NO: 1293 - RNA, 22 nt, Homo Sapiens
ggcagaugggacucugugccca

SEQ ID NO: 1294 - RNA, 22 nt, Homo Sapiens
ugcuagguuuuuuccuuucccc

SEQ ID NO: 1295 - RNA, 22 nt, Homo Sapiens
uucacauguugcucaguuuugc

SEQ ID NO: 1296 - RNA, 22 nt, Homo Sapiens
ucuuugaucucuuccggggcuu

SEQ ID NO: 1297 - RNA, 22 nt, Homo Sapiens
ugaguauucaccaggugcuggg

SEQ ID NO: 1298 - RNA, 22 nt, Homo Sapiens
ugagggggaaggugugugugug

SEQ ID NO: 1299 - RNA, 22 nt, Homo Sapiens
ugagguaaguauguuauuggaa

SEQ ID NO: 1300 - RNA, 22 nt, Homo Sapiens
cagugggaaaaguuugucucau

SEQ ID NO: 1301 - RNA, 22 nt, Homo Sapiens
gagguagagguugcagugaguc

SEQ ID NO: 1302 - RNA, 22 nt, Homo Sapiens
gagguagagguugcagugagug

SEQ ID NO: 1303 - RNA, 22 nt, Homo Sapiens
agaggcacagauuaauggaguu

SEQ ID NO: 1304 - RNA, 22 nt, Homo Sapiens
aggccagagaggacucucuuuu

SEQ ID NO: 1305 - RNA, 22 nt, Homo Sapiens
aguauuucuuguuuuauugaga

SEQ ID NO: 1306 - RNA, 22 nt, Homo Sapiens
augcccuuccucuucugccaug

SEQ ID NO: 1307 - RNA, 22 nt, Homo Sapiens
acaaggcagggcaggugucugu

SEQ ID NO: 1308 - RNA, 22 nt, Homo Sapiens
aaaggcagacggugaaugccuu

SEQ ID NO: 1309 - RNA, 22 nt, Homo Sapiens
aagacacuuucuaaauagaagu

SEQ ID NO: 1310 - RNA, 22 nt, Homo Sapiens
uugccuggagacauuucuacug

SEQ ID NO: 1311 - RNA, 22 nt, Homo Sapiens
uuuccuguuuugguuuggagag

SEQ ID NO: 1312 - RNA, 22 nt, Homo Sapiens
uuguaaauaacauuuuuuagca

SEQ ID NO: 1313 - RNA, 22 nt, Homo Sapiens
uugagcaaaauaucugguuuca

SEQ ID NO: 1314 - RNA, 22 nt, Homo Sapiens
uucuuuuuccgcuuucugagcc

SEQ ID NO: 1315 - RNA, 22 nt, Homo Sapiens
aggcugcaguguaguggcauga

SEQ ID NO: 1316 - RNA, 22 nt, Homo Sapiens
uuacugggcuccucucagugug

SEQ ID NO: 1317 - RNA, 22 nt, Homo Sapiens
uucacaguggcugaagcuguuc

SEQ ID NO: 1318 - RNA, 22 nt, Homo Sapiens
ugucuggaggcgcaguuuucag

SEQ ID NO: 1319 - RNA, 22 nt, Homo Sapiens
uguacaaggggcucagccagcc

SEQ ID NO: 1320 - RNA, 22 nt, Homo Sapiens
uggagaccugugugguuugugg

SEQ ID NO: 1321 - RNA, 22 nt, Homo Sapiens
uggaggcaggugcagauggagg

SEQ ID NO: 1322 - RNA, 22 nt, Homo Sapiens
uggagugucuggaggugucucu

SEQ ID NO: 1323 - RNA, 22 nt, Homo Sapiens
ugggaggcuacacguuucucca

SEQ ID NO: 1324 - RNA, 22 nt, Homo Sapiens
ucugcugugauggacacuugua

SEQ ID NO: 1325 - RNA, 21 nt, Homo Sapiens
ucugcugugauggacacuugu

SEQ ID NO: 1326 - RNA, 22 nt, Homo Sapiens
ucugccucccugucucacucuc

SEQ ID NO: 1327 - RNA, 22 nt, Homo Sapiens
ucccagucaucugggaugugca

SEQ ID NO: 1328 - RNA, 22 nt, Homo Sapiens
ucccucugccugcaguccugcu

SEQ ID NO: 1329 - RNA, 22 nt, Homo Sapiens
ggcaccaucucagcucacugga

SEQ ID NO: 1330 - RNA, 22 nt, Homo Sapiens
ggcaauauuccaggauaggcug

SEQ ID NO: 1331 - RNA, 22 nt, Homo Sapiens
ggaguaugagagagaaugggac

SEQ ID NO: 1332 - RNA, 22 nt, Homo Sapiens
ggcaugauggagaggguggaga

SEQ ID NO: 1333 - RNA, 22 nt, Homo Sapiens
ggcaugugugagcagcugcagg

SEQ ID NO: 1334 - RNA, 22 nt, Homo Sapiens
gcagcucccuauuccaugacag

SEQ ID NO: 1335 - RNA, 22 nt, Homo Sapiens
gcugaauuuugacuccaucucc

SEQ ID NO: 1336 - RNA, 22 nt, Homo Sapiens
ggaggaggaggcuggugcuggu

SEQ ID NO: 1337 - RNA, 22 nt, Homo Sapiens
ggacugcagucacacucuaaga

SEQ ID NO: 1338 - RNA, 22 nt, Homo Sapiens
gcugcuccugcucucccucucc

SEQ ID NO: 1339 - RNA, 22 nt, Homo Sapiens
guuuuaggcaacauaggaagac

SEQ ID NO: 1340 - RNA, 22 nt, Homo Sapiens
gugauuaaauuaaggcucuuga

SEQ ID NO: 1341 - RNA, 22 nt, Homo Sapiens
ggugacagagacucugccucga

SEQ ID NO: 1342 - RNA, 22 nt, Homo Sapiens
guaacaaaaugaauaauaccug

SEQ ID NO: 1343 - RNA, 22 nt, Homo Sapiens
guauguauuuauagauguucuu

SEQ ID NO: 1344 - RNA, 22 nt, Homo Sapiens
gucagcaaggagggguggacaa

SEQ ID NO: 1345 - RNA, 22 nt, Homo Sapiens
guauggagaucucugcccuugu

SEQ ID NO: 1346 - RNA, 22 nt, Homo Sapiens
gucuuccuccguccccaccucc

SEQ ID NO: 1347 - RNA, 22 nt, Homo Sapiens
uauugcacuccagccugggcaa

SEQ ID NO: 1348 - RNA, 22 nt, Homo Sapiens
uagggggucaccuaugugggag

SEQ ID NO: 1349 - RNA, 22 nt, Homo Sapiens
uaagcagucuuucuucuucuuc

SEQ ID NO: 1350 - RNA, 22 nt, Homo Sapiens
uaaguaaagagagaagccagaa

SEQ ID NO: 1351 - RNA, 22 nt, Homo Sapiens
aggggguuuagcuccacagggu

SEQ ID NO: 1352 - RNA, 22 nt, Homo Sapiens
aggcaguaagggagaguuuugc

SEQ ID NO: 1353 - RNA, 22 nt, Homo Sapiens
aggccuuuuugggaagagacag

SEQ ID NO: 1354 - RNA, 22 nt, Homo Sapiens
aggcagguggguguaugggucu

SEQ ID NO: 1355 - RNA, 22 nt, Homo Sapiens
agagcuaggaagauacaggguu

SEQ ID NO: 1356 - RNA, 22 nt, Homo Sapiens
agagacacagacacaugggaga

SEQ ID NO: 1357 - RNA, 22 nt, Homo Sapiens
agcagcucaagucuucuccaga

SEQ ID NO: 1358 - RNA, 22 nt, Homo Sapiens
agcagagccaccaaauuuagug

SEQ ID NO: 1359 - RNA, 22 nt, Homo Sapiens
agcaagaugguagcauuggaga

SEQ ID NO: 1360 - RNA, 22 nt, Homo Sapiens
auucccuuuagcucugauggca

SEQ ID NO: 1361 - RNA, 22 nt, Homo Sapiens
augggagacugaggggcggacg

SEQ ID NO: 1362 - RNA, 22 nt, Homo Sapiens
agguggcacugugugggguggg

SEQ ID NO: 1363 - RNA, 22 nt, Homo Sapiens
agucagacguuuggcaacagca

SEQ ID NO: 1364 - RNA, 22 nt, Homo Sapiens
aguccaguguucucugcucugu

SEQ ID NO: 1365 - RNA, 22 nt, Homo Sapiens
auaagcacagggagguucuguc

SEQ ID NO: 1366 - RNA, 22 nt, Homo Sapiens
aaauccuggggaucuggaggga

SEQ ID NO: 1367 - RNA, 22 nt, Homo Sapiens
aaagacaguucagugacaaguu

SEQ ID NO: 1368 - RNA, 22 nt, Homo Sapiens
aaagacuuggcugucagcccug

SEQ ID NO: 1369 - RNA, 22 nt, Homo Sapiens
aaggcuuuucugggaagagcug

SEQ ID NO: 1370 - RNA, 22 nt, Homo Sapiens
aaugaagccacagagauuugcu

SEQ ID NO: 1371 - RNA, 22 nt, Homo Sapiens
acugcacuccauccugagugac

SEQ ID NO: 1372 - RNA, 22 nt, Homo Sapiens
acugcacuccagccuggcaaca

SEQ ID NO: 1373 - RNA, 22 nt, Homo Sapiens
acccacccucugugaggaggau

SEQ ID NO: 1374 - RNA, 22 nt, Homo Sapiens
accagcugcauccugcaaacuu

SEQ ID NO: 1375 - RNA, 22 nt, Homo Sapiens
acuguacuccacccugggcgac

SEQ ID NO: 1376 - RNA, 22 nt, Homo Sapiens
gaggucacuguuggaugucaga

SEQ ID NO: 1377 - RNA, 22 nt, Homo Sapiens
gauggcagcuggagguggagca

SEQ ID NO: 1378 - RNA, 22 nt, Homo Sapiens
gaacagcuccagucuacagccc

SEQ ID NO: 1379 - RNA, 22 nt, Homo Sapiens
gaagcauugugagaaacagguu

SEQ ID NO: 1380 - RNA, 22 nt, Homo Sapiens
cuccuacaacugacucucugga

SEQ ID NO: 1381 - RNA, 22 nt, Homo Sapiens
cuggcucccucucuucucuccc

SEQ ID NO: 1382 - RNA, 22 nt, Homo Sapiens
cuggcucccaggaggccucucu

SEQ ID NO: 1383 - RNA, 22 nt, Homo Sapiens
cuggguggccuucaguccauga

SEQ ID NO: 1384 - RNA, 22 nt, Homo Sapiens
cuggugaggaaggagcagaguu

SEQ ID NO: 1385 - RNA, 22 nt, Homo Sapiens
cugugcccagccagggcugugu

SEQ ID NO: 1386 - RNA, 22 nt, Homo Sapiens
cagugggaaaaguuugucucau

SEQ ID NO: 1387 - RNA, 22 nt, Homo Sapiens
cagaggaugcggcugggaacgg

SEQ ID NO: 1388 - RNA, 22 nt, Homo Sapiens
caugguacugccacagaagagu

SEQ ID NO: 1389 - RNA, 22 nt, Homo Sapiens
caucucagucuauguccuugcu

SEQ ID NO: 1390 - RNA, 22 nt, Homo Sapiens
cauugcacuccagccuaggcaa

SEQ ID NO: 1391 - RNA, 22 nt, Homo Sapiens
cauugcacuccacccuaggcaa

SEQ ID NO: 1392 - RNA, 22 nt, Homo Sapiens
cauuggguaucaccuauacaga

SEQ ID NO: 1393 - RNA, 22 nt, Homo Sapiens
cgcuauguuggccaggcugguc

SEQ ID NO: 1394 - RNA, 22 nt, Homo Sapiens
uugagcaaaauaucugguuuca

SEQ ID NO: 1395 - RNA, 22 nt, Homo Sapiens
uugcaaggaaggggaggaggcu

SEQ ID NO: 1396 - RNA, 22 nt, Homo Sapiens
uugcauaugcauggguacacag

SEQ ID NO: 1397 - RNA, 22 nt, Homo Sapiens
uuucuggagggcaagugcaggg

SEQ ID NO: 1398 - RNA, 22 nt, Homo Sapiens
uuuggucuaaucuucaagagga

SEQ ID NO: 1399 - RNA, 22 nt, Homo Sapiens
uugcccaggcuggagugcagug

SEQ ID NO: 1400 - RNA, 22 nt, Homo Sapiens
uugcccaggcuagagugcagug

SEQ ID NO: 1401 - RNA, 22 nt, Homo Sapiens
cccaggcuggagugcaguggug

SEQ ID NO: 1402 - RNA, 22 nt, Homo Sapiens
ccaaagugcugggauuacaggc

SEQ ID NO: 1403 - RNA, 22 nt, Homo Sapiens
ccaaagugcuaggauuacagcc

SEQ ID NO: 1404 - RNA, 22 nt, Homo Sapiens
cccaggaggcggagguugcagu

SEQ ID NO: 1405 - RNA, 22 nt, Homo Sapiens
ccaaagugcuggcguuacaggu

SEQ ID NO: 1406 - RNA, 22 nt, Homo Sapiens
ccaaagugcuaggaauacaggu

SEQ ID NO: 1407 - RNA, 22 nt, Homo Sapiens
cagaaucuuuugucucugagaa

SEQ ID NO: 1408 - RNA, 22 nt, Homo Sapiens
cagguggugcuguuaagaagca

SEQ ID NO: 1409 - RNA, 22 nt, Homo Sapiens
caaagugcugagauuacaggca

SEQ ID NO: 1410 - RNA, 22 nt, Homo Sapiens
cacugcaaugacugucagaaca

SEQ ID NO: 1411 - RNA, 22 nt, Homo Sapiens
cugggauuacaggugugaacca

SEQ ID NO: 1412 - RNA, 22 nt, Homo Sapiens
cugauugaaccauucacuuuau

SEQ ID NO: 1413 - RNA, 22 nt, Homo Sapiens
gagauccuuucacaguuguggu

SEQ ID NO: 1414 - RNA, 22 nt, Homo Sapiens
gagugagugugaucuuggcuca

SEQ ID NO: 1415 - RNA, 22 nt, Homo Sapiens
agaaguaguaguagcaguagua

SEQ ID NO: 1416 - RNA, 22 nt, Homo Sapiens
acaguguuacccaggcuggucu

SEQ ID NO: 1417 - RNA, 22 nt, Homo Sapiens
aagugcugggauuacaggccug

SEQ ID NO: 1418 - RNA, 22 nt, Homo Sapiens
acagcaagucuuugucaaagcu

SEQ ID NO: 1419 - RNA, 22 nt, Homo Sapiens
agugauuuuccugccucagccu

SEQ ID NO: 1420 - RNA, 22 nt, Homo Sapiens
augugucugggacucuaugcca

SEQ ID NO: 1421 - RNA, 22 nt, Homo Sapiens
agacuggccucaagcucccaga

SEQ ID NO: 1422 - RNA, 22 nt, Homo Sapiens
aggcugagugcaguggugugau

SEQ ID NO: 1423 - RNA, 22 nt, Homo Sapiens
aggcuuuuggagaagcauaugc

SEQ ID NO: 1424 - RNA, 22 nt, Homo Sapiens
agggagugucagaaugccagca

SEQ ID NO: 1425 - RNA, 22 nt, Homo Sapiens
uagaaagcuaacaagcuagaga

SEQ ID NO: 1426 - RNA, 22 nt, Homo Sapiens
uagcaaccuuaauauuuuacag

SEQ ID NO: 1427 - RNA, 22 nt, Homo Sapiens
ucacugcaaccucugcuucugg

SEQ ID NO: 1428 - RNA, 22 nt, Homo Sapiens
gugcucaucuucuguaacuguu

SEQ ID NO: 1429 - RNA, 22 nt, Homo Sapiens
gauuuucauaggagcagaaacc

SEQ ID NO: 1430 - RNA, 22 nt, Homo Sapiens
ggcaaggaagaaagcagaaguu

SEQ ID NO: 1431 - RNA, 22 nt, Homo Sapiens
ggcaggaucauagcucacugca

SEQ ID NO: 1432 - RNA, 22 nt, Homo Sapiens
ggcgugaucuuggcucaccaca

SEQ ID NO: 1433 - RNA, 22 nt, Homo Sapiens
ucaguagcugucaaaacuggag

SEQ ID NO: 1434 - RNA, 22 nt, Homo Sapiens
ucucauauagcuggguugcagc

SEQ ID NO: 1435 - RNA, 22 nt, Homo Sapiens
ugaaaugcuuuuaggacacugc

SEQ ID NO: 1436 - RNA, 22 nt, Homo Sapiens
ugauccucuggcuucagccucc

SEQ ID NO: 1437 - RNA, 22 nt, Homo Sapiens
ugcagccuugaacucuuucugg

SEQ ID NO: 1438 - RNA, 22 nt, Homo Sapiens
ugcaagucugugauuuuguguu

SEQ ID NO: 1439 - RNA, 22 nt, Homo Sapiens
ucuaacacugacuucuauucca

SEQ ID NO: 1440 - RNA, 21 nt, Homo Sapiens
ucugcugugauggacacuugu

SEQ ID NO: 1441 - RNA, 22 nt, Homo Sapiens
ucugcugugauggacacuugua

SEQ ID NO: 1442 - RNA, 22 nt, Homo Sapiens
ucugccucccugucucacucuc

SEQ ID NO: 1443 - RNA, 22 nt, Homo Sapiens
uggagcagaaaggcaggagucc

SEQ ID NO: 1444 - RNA, 22 nt, Homo Sapiens
uguguuggagcagaggcagggg

SEQ ID NO: 1445 - RNA, 22 nt, Homo Sapiens
uuauccuaaauguguuuugaag

SEQ ID NO: 1446 - RNA, 22 nt, Homo Sapiens
uucagcauugccaguguuucca

SEQ ID NO: 1447 - RNA, 22 nt, Homo Sapiens
uuccaguuuuuccuaccccuua

SEQ ID NO: 1448 - RNA, 22 nt, Homo Sapiens
gggcaugaugauggcacuagcg

SEQ ID NO: 1449 - RNA, 22 nt, Homo Sapiens
ggcaauauuccaggauaggcug

SEQ ID NO: 1450 - RNA, 22 nt, Homo Sapiens
ggcaugauggagaggguggaga

SEQ ID NO: 1451 - RNA, 22 nt, Homo Sapiens
gcagcaggcagggccaggcagg

SEQ ID NO: 1452 - RNA, 22 nt, Homo Sapiens
gaguuaagcaaagagaggaaga

SEQ ID NO: 1453 - RNA, 22 nt, Homo Sapiens
gcacauucccgcaggguguaag

SEQ ID NO: 1454 - RNA, 22 nt, Homo Sapiens
ggaauggauggaagugugugag

SEQ ID NO: 1455 - RNA, 22 nt, Homo Sapiens
guuaggaaaugugcuuacuggg

SEQ ID NO: 1456 - RNA, 22 nt, Homo Sapiens
ucacugcaaccucugcuucugg

SEQ ID NO: 1457 - RNA, 22 nt, Homo Sapiens
ucaaguaauccaggauaggcug

SEQ ID NO: 1458 - RNA, 22 nt, Homo Sapiens
uaguuguuugggauugguagug

SEQ ID NO: 1459 - RNA, 22 nt, Homo Sapiens
uagaaagugucucauuuuaaua

SEQ ID NO: 1460 - RNA, 22 nt, Homo Sapiens
uaagcagucuuucuucuucuuc

SEQ ID NO: 1461 - RNA, 22 nt, Homo Sapiens
aggcaagagguugcagugagcu

SEQ ID NO: 1462 - RNA, 22 nt, Homo Sapiens
agcagcgcagguagauggggcu

SEQ ID NO: 1463 - RNA, 22 nt, Homo Sapiens
auaagcacagggagguucuguc

SEQ ID NO: 1464 - RNA, 22 nt, Homo Sapiens
acacuugucugcuuucuacacu

SEQ ID NO: 1465 - RNA, 22 nt, Homo Sapiens
aagcagaacuguuuuguuuucu

SEQ ID NO: 1466 - RNA, 22 nt, Homo Sapiens
gagguagagguugcagugaguc

SEQ ID NO: 1467 - RNA, 22 nt, Homo Sapiens
gagauccuuucacaguuguggu

SEQ ID NO: 1468 - RNA, 22 nt, Homo Sapiens
gacaagaggcacagacagcagg

SEQ ID NO: 1469 - RNA, 22 nt, Homo Sapiens
gaaacuaguguugggacaaagg

SEQ ID NO: 1470 - RNA, 22 nt, Homo Sapiens
cugcacuagaaggcacuauguu

SEQ ID NO: 1471 - RNA, 22 nt, Homo Sapiens
cuggcuaauuuucuugaguuuu

SEQ ID NO: 1472 - RNA, 22 nt, Homo Sapiens
cugugagcuauuuguuuugguu

SEQ ID NO: 1473 - RNA, 22 nt, Homo Sapiens
cuguucagaucugugugcauuu

SEQ ID NO: 1474 - RNA, 22 nt, Homo Sapiens
cacugcaaccucugccuccugg

SEQ ID NO: 1475 - RNA, 22 nt, Homo Sapiens
caaagugcugagauuacaggca

SEQ ID NO: 1476 - RNA, 22 nt, Homo Sapiens
cacuuucagagaugcccugagu

SEQ ID NO: 1477 - RNA, 22 nt, Homo Sapiens
uugcuucauuagggcaagcaag

SEQ ID NO: 1478 - RNA, 22 nt, Homo Sapiens
uugcccaggcuagagugcagug

SEQ ID NO: 1479 - RNA, 22 nt, Homo Sapiens
uugccuaggcuggagugcagug

SEQ ID NO: 1480 - RNA, 22 nt, Homo Sapiens
uugcccaggcuggagugcagug

SEQ ID NO: 1481 - RNA, 22 nt, Homo Sapiens
uugccuaggccggagugcagug

SEQ ID NO: 1482 - RNA, 22 nt, Homo Sapiens
uugcucaggcuggagugcagug

SEQ ID NO: 1483 - RNA, 22 nt, Homo Sapiens
uuuugcaaauuacuaaauuucu

SEQ ID NO: 1484 - RNA, 22 nt, Homo Sapiens
cacugcuguaauggacggugag

SEQ ID NO: 1485 - RNA, 22 nt, Homo Sapiens
cacugcacuguagccuccuggg

SEQ ID NO: 1486 - RNA, 22 nt, Homo Sapiens
caaagugcugagauuacaggca

SEQ ID NO: 1487 - RNA, 22 nt, Homo Sapiens
cacccaggcuggagugcagugg

SEQ ID NO: 1488 - RNA, 22 nt, Homo Sapiens
auuguaaauuaacaauuugcuc

SEQ ID NO: 1489 - RNA, 22 nt, Homo Sapiens
cacugcaaccucugccuccugg

SEQ ID NO: 1490 - RNA, 22 nt, Homo Sapiens
cacugcaaccuccaccuccugg

SEQ ID NO: 1491 - RNA, 22 nt, Homo Sapiens
cacugcaaccucugccaccugg

SEQ ID NO: 1492 - RNA, 22 nt, Homo Sapiens
cacugcaacccccgccucccag

SEQ ID NO: 1493 - RNA, 22 nt, Homo Sapiens
cacugcaagcuccaccucccgg

SEQ ID NO: 1494 - RNA, 22 nt, Homo Sapiens
ccaaagugcuaggaauacaggu

SEQ ID NO: 1495 - RNA, 22 nt, Homo Sapiens
ccaaagugcuggcguuacaggu

SEQ ID NO: 1496 - RNA, 22 nt, Homo Sapiens
ccaaagugcuaggauuacagcc

SEQ ID NO: 1497 - RNA, 22 nt, Homo Sapiens
ccaaagugcugggauuacaggc

SEQ ID NO: 1498 - RNA, 22 nt, Homo Sapiens
cccaggcuggagugcaguggug

SEQ ID NO: 1499 - RNA, 22 nt, Homo Sapiens
cgcuauguuggccaggcugguc

SEQ ID NO: 1500 - RNA, 22 nt, Homo Sapiens
ccuggagugacagguguagccu

SEQ ID NO: 1501 - RNA, 22 nt, Homo Sapiens
cugggauuacaggugugaacca

SEQ ID NO: 1502 - RNA, 22 nt, Homo Sapiens
cugccuccuggguucaagcaau

SEQ ID NO: 1503 - RNA, 22 nt, Homo Sapiens
cuccuaggcuggagugcagugg

SEQ ID NO: 1504 - RNA, 22 nt, Homo Sapiens
cucacugcaaccuccgccuccc

SEQ ID NO: 1505 - RNA, 22 nt, Homo Sapiens
gagguuugagccuucuccugcu

SEQ ID NO: 1506 - RNA, 22 nt, Homo Sapiens
acaaccucugccuccuggguuc

SEQ ID NO: 1507 - RNA, 22 nt, Homo Sapiens
aagugcugggauuacaggccug

SEQ ID NO: 1508 - RNA, 22 nt, Homo Sapiens
acaguguuacccaggcuggucu

SEQ ID NO: 1509 - RNA, 22 nt, Homo Sapiens
acugcagcuucagggacuugug

SEQ ID NO: 1510 - RNA, 22 nt, Homo Sapiens
aguuccauggaaaacaacaaag

SEQ ID NO: 1511 - RNA, 22 nt, Homo Sapiens
agugauuuuccugccucagccu

SEQ ID NO: 1512 - RNA, 22 nt, Homo Sapiens
aggugggguuucaccauguugg

SEQ ID NO: 1513 - RNA, 22 nt, Homo Sapiens
aggcugagugcaguggugugau

SEQ ID NO: 1514 - RNA, 22 nt, Homo Sapiens
uagaguuauaugaugugcuagu

SEQ ID NO: 1515 - RNA, 22 nt, Homo Sapiens
ucacccaggcuggagugcagug

SEQ ID NO: 1516 - RNA, 22 nt, Homo Sapiens
ucaagcgauucucaugccuuag

SEQ ID NO: 1517 - RNA, 22 nt, Homo Sapiens
ucacugcaaccucugcuucugg

SEQ ID NO: 1518 - RNA, 22 nt, Homo Sapiens
ucacugcaaccuccgccugccg

SEQ ID NO: 1519 - RNA, 22 nt, Homo Sapiens
ucacugcaaccuccaccucccg

SEQ ID NO: 1520 - RNA, 22 nt, Homo Sapiens
ucacugcaaccucugccuuccg

SEQ ID NO: 1521 - RNA, 22 nt, Homo Sapiens
gucuugaucuccugaccuugug

SEQ ID NO: 1522 - RNA, 22 nt, Homo Sapiens
gcugugguucugcaugaagaca

SEQ ID NO: 1523 - RNA, 22 nt, Homo Sapiens
ugugacugaggugcgcauaaag

SEQ ID NO: 1524 - RNA, 22 nt, Homo Sapiens
uuaccauguuggccaggcuggu

SEQ ID NO: 1525 - RNA, 22 nt, Homo Sapiens
ugugccacugcacuccaugggu

SEQ ID NO: 1526 - RNA, 22 nt, Homo Sapiens
uggacaaugaaacccugaccuu

SEQ ID NO: 1527 - RNA, 22 nt, Homo Sapiens
ugggguuucuccauguugguca

SEQ ID NO: 1528 - RNA, 22 nt, Homo Sapiens
ucauugcaaccuccaccuccug

SEQ ID NO: 1529 - RNA, 21 nt, Homo Sapiens
ugagguaggugcugaaacugc

SEQ ID NO: 1530 - RNA, 22 nt, Homo Sapiens
ugagguaggugcugaaacugcu

SEQ ID NO: 1531 - RNA, 22 nt, Homo Sapiens
aaaguggcuggaguggagucuu

SEQ ID NO: 1532 - RNA, 22 nt, Homo Sapiens
cuggcuaauuuucuugaguuuu

SEQ ID NO: 1533 - RNA, 22 nt, Homo Sapiens
ccaggguacucugggaucacuu

SEQ ID NO: 1534 - RNA, 22 nt, Homo Sapiens
cccaggagguggagguuacagu

SEQ ID NO: 1535 - RNA, 22 nt, Homo Sapiens
cguguaaucccagcuacuuggg

SEQ ID NO: 1536 - RNA, 22 nt, Homo Sapiens
cuauuuuacauggucacuauca

SEQ ID NO: 1537 - RNA, 22 nt, Homo Sapiens
cauuucaacuuuguuguucuuu

SEQ ID NO: 1538 - RNA, 22 nt, Homo Sapiens
ccacugcacuccagcacuccag

SEQ ID NO: 1539 - RNA, 22 nt, Homo Sapiens
ccacugcacuccagccugggug

SEQ ID NO: 1540 - RNA, 22 nt, Homo Sapiens
cccaggaggcggagguugcagu

SEQ ID NO: 1541 - RNA, 22 nt, Homo Sapiens
ccaggcaacuguguuuuuuaag

SEQ ID NO: 1542 - RNA, 22 nt, Homo Sapiens
cauugcacuccagccuggguga

SEQ ID NO: 1543 - RNA, 22 nt, Homo Sapiens
cauugcacuccacccuaggcaa

SEQ ID NO: 1544 - RNA, 22 nt, Homo Sapiens
cauugcacuccagccuaggcaa

SEQ ID NO: 1545 - RNA, 22 nt, Homo Sapiens
caugguacugccacagaagagu

SEQ ID NO: 1546 - RNA, 22 nt, Homo Sapiens
cacugcacucagccugggugac

SEQ ID NO: 1547 - RNA, 22 nt, Homo Sapiens
cacugcacuccagcccggcaac

SEQ ID NO: 1548 - RNA, 22 nt, Homo Sapiens
cacugcacuccacccugggcaa

SEQ ID NO: 1549 - RNA, 22 nt, Homo Sapiens
auugcuugagcccaggaguuca

SEQ ID NO: 1550 - RNA, 22 nt, Homo Sapiens
auuguucuccagccugggcgac

SEQ ID NO: 1551 - RNA, 22 nt, Homo Sapiens
cacacagucguguaguuuugcg

SEQ ID NO: 1552 - RNA, 22 nt, Homo Sapiens
cacugcacuguagccuccuggg

SEQ ID NO: 1553 - RNA, 22 nt, Homo Sapiens
cacugcacucuagccucgguga

SEQ ID NO: 1554 - RNA, 22 nt, Homo Sapiens
cacccccaggaccaccuugcga

SEQ ID NO: 1555 - RNA, 22 nt, Homo Sapiens
cacugcacuccaaccuggacaa

SEQ ID NO: 1556 - RNA, 22 nt, Homo Sapiens
cacugcacuccagccuaggcaa

SEQ ID NO: 1557 - RNA, 22 nt, Homo Sapiens
cacugcacuccagccugggcga

SEQ ID NO: 1558 - RNA, 22 nt, Homo Sapiens
cacugcacuccagccuggguaa

SEQ ID NO: 1559 - RNA, 22 nt, Homo Sapiens
cacugcacuccagccuggguga

SEQ ID NO: 1560 - RNA, 22 nt, Homo Sapiens
cagaaucuuuugucucugagaa

SEQ ID NO: 1561 - RNA, 22 nt, Homo Sapiens
cagagagguucaaugucuuacu

SEQ ID NO: 1562 - RNA, 22 nt, Homo Sapiens
cuggcuaauuuucuugaguuuu

SEQ ID NO: 1563 - RNA, 22 nt, Homo Sapiens
cuggaagacaugguagagcuga

SEQ ID NO: 1564 - RNA, 21 nt, Homo Sapiens
cugcuaaacauccuacacugc

SEQ ID NO: 1565 - RNA, 22 nt, Homo Sapiens
cugaggucaggaguucgagacc

SEQ ID NO: 1566 - RNA, 22 nt, Homo Sapiens
cugaggcaggagggcucaggag

SEQ ID NO: 1567 - RNA, 22 nt, Homo Sapiens
cucagauacuugggagguugag

SEQ ID NO: 1568 - RNA, 22 nt, Homo Sapiens
cuccuacaacugacucucugga

SEQ ID NO: 1569 - RNA, 22 nt, Homo Sapiens
cugggauggaggagaauuagag

SEQ ID NO: 1570 - RNA, 22 nt, Homo Sapiens
cugugggugagagagugggaga

SEQ ID NO: 1571 - RNA, 22 nt, Homo Sapiens
cuugcacuccacagccugggug

SEQ ID NO: 1572 - RNA, 22 nt, Homo Sapiens
gaggcgggaagcccacuaggag

SEQ ID NO: 1573 - RNA, 22 nt, Homo Sapiens
gagguagagguugcagugagug

SEQ ID NO: 1574 - RNA, 22 nt, Homo Sapiens
gaguaacagcacucacuggagu

SEQ ID NO: 1575 - RNA, 22 nt, Homo Sapiens
gauuccuccucuuuaaaauggu

SEQ ID NO: 1576 - RNA, 22 nt, Homo Sapiens
gagguagagguugcagugaguc

SEQ ID NO: 1577 - RNA, 22 nt, Homo Sapiens
gagauggaguuuuacuauguug

SEQ ID NO: 1578 - RNA, 22 nt, Homo Sapiens
gagcagguuuggaauggcucca

SEQ ID NO: 1579 - RNA, 22 nt, Homo Sapiens
gaauaaugucccacugggaggc

SEQ ID NO: 1580 - RNA, 22 nt, Homo Sapiens
aacccuggaggcagagguugcg

SEQ ID NO: 1581 - RNA, 22 nt, Homo Sapiens
aagcugccauugaagaucuggg

SEQ ID NO: 1582 - RNA, 22 nt, Homo Sapiens
aaucccagcuacucgggaggcu

SEQ ID NO: 1583 - RNA, 22 nt, Homo Sapiens
acaaaaaauuagccagacuggu

SEQ ID NO: 1584 - RNA, 22 nt, Homo Sapiens
acaaaaaauacgaaaauuagcu

SEQ ID NO: 1585 - RNA, 22 nt, Homo Sapiens
acagcaguccagccugggugac

SEQ ID NO: 1586 - RNA, 22 nt, Homo Sapiens
acugcacucuagccugagcaac

SEQ ID NO: 1587 - RNA, 22 nt, Homo Sapiens
acugcacucuagccugggcaac

SEQ ID NO: 1588 - RNA, 22 nt, Homo Sapiens
acugcacuucagccugggcaau

SEQ ID NO: 1589 - RNA, 22 nt, Homo Sapiens
acugcacucuagccuaggugau

SEQ ID NO: 1590 - RNA, 22 nt, Homo Sapiens
acugcacuccugccugggugac

SEQ ID NO: 1591 - RNA, 22 nt, Homo Sapiens
acugcacuccugccuaggugac

SEQ ID NO: 1592 - RNA, 22 nt, Homo Sapiens
acugcacuccauccuggggagc

SEQ ID NO: 1593 - RNA, 22 nt, Homo Sapiens
acuguacuucagccuggguaac

SEQ ID NO: 1594 - RNA, 22 nt, Homo Sapiens
acugggauaugaagacugugug

SEQ ID NO: 1595 - RNA, 22 nt, Homo Sapiens
acuguacuccagccugggcaac

SEQ ID NO: 1596 - RNA, 22 nt, Homo Sapiens
acuguacuccagccugggugac

SEQ ID NO: 1597 - RNA, 22 nt, Homo Sapiens
acuguacuccagccuaggcaac

SEQ ID NO: 1598 - RNA, 22 nt, Homo Sapiens
acuguacuucagccugggcaac

SEQ ID NO: 1599 - RNA, 22 nt, Homo Sapiens
acugcacuccagccuggcaaca

SEQ ID NO: 1600 - RNA, 22 nt, Homo Sapiens
acugcacuccagccuaugggau

SEQ ID NO: 1601 - RNA, 22 nt, Homo Sapiens
acugcacuccaaccaggcugac

SEQ ID NO: 1602 - RNA, 22 nt, Homo Sapiens
accugcauuccagccugcugac

SEQ ID NO: 1603 - RNA, 22 nt, Homo Sapiens
acccgagagguggagguugcag

SEQ ID NO: 1604 - RNA, 22 nt, Homo Sapiens
acugcacuccauccugagugac

SEQ ID NO: 1605 - RNA, 22 nt, Homo Sapiens
acugcacuccauccugggacag

SEQ ID NO: 1606 - RNA, 22 nt, Homo Sapiens
acugcacuccagucugggugac

SEQ ID NO: 1607 - RNA, 22 nt, Homo Sapiens
acugcacuccagucuaggugac

SEQ ID NO: 1608 - RNA, 22 nt, Homo Sapiens
acugcacuccagccuguugaca

SEQ ID NO: 1609 - RNA, 22 nt, Homo Sapiens
acugcacuccagccuggcgaca

SEQ ID NO: 1610 - RNA, 22 nt, Homo Sapiens
acugcacuccagccugggcgau

SEQ ID NO: 1611 - RNA, 22 nt, Homo Sapiens
acugcacuccagccugggugau

SEQ ID NO: 1612 - RNA, 22 nt, Homo Sapiens
acugcacuccagccugggugac

SEQ ID NO: 1613 - RNA, 22 nt, Homo Sapiens
acugcacuccagccuggguggc

SEQ ID NO: 1614 - RNA, 22 nt, Homo Sapiens
agggcacacgucucucugaauu

SEQ ID NO: 1615 - RNA, 22 nt, Homo Sapiens
aggguuguuaguuuuuugguug

SEQ ID NO: 1616 - RNA, 22 nt, Homo Sapiens
aggugagaaaacugaggcucag

SEQ ID NO: 1617 - RNA, 22 nt, Homo Sapiens
aggcaagagguugcagugagcu

SEQ ID NO: 1618 - RNA, 22 nt, Homo Sapiens
agcggagaccugagcuaugagu

SEQ ID NO: 1619 - RNA, 22 nt, Homo Sapiens
agagacacagacacaugggaga

SEQ ID NO: 1620 - RNA, 22 nt, Homo Sapiens
agaggcacagauuaauggaguu

SEQ ID NO: 1621 - RNA, 22 nt, Homo Sapiens
agcaaaagccaugcccaggaga

SEQ ID NO: 1622 - RNA, 22 nt, Homo Sapiens
agauggaguuugagagggaaua

SEQ ID NO: 1623 - RNA, 22 nt, Homo Sapiens
agaugauguuggagucugugcu

SEQ ID NO: 1624 - RNA, 22 nt, Homo Sapiens
agauggagaaguguuuucagau

SEQ ID NO: 1625 - RNA, 22 nt, Homo Sapiens
agugagcuaugaucaugccggu

SEQ ID NO: 1626 - RNA, 22 nt, Homo Sapiens
agugagccgagauacauacaua

SEQ ID NO: 1627 - RNA, 22 nt, Homo Sapiens
agugguuucagggacuucugua

SEQ ID NO: 1628 - RNA, 22 nt, Homo Sapiens
auacagcucucucuggggacuu

SEQ ID NO: 1629 - RNA, 22 nt, Homo Sapiens
auacugagagaaaaagcuuguc

SEQ ID NO: 1630 - RNA, 22 nt, Homo Sapiens
auagaagagcagugggguagaa

SEQ ID NO: 1631 - RNA, 22 nt, Homo Sapiens
auauuggugaaaugcuagcaaa

SEQ ID NO: 1632 - RNA, 22 nt, Homo Sapiens
auugcacuccagccugggcaau

SEQ ID NO: 1633 - RNA, 22 nt, Homo Sapiens
auugcacuccagccugggugac

SEQ ID NO: 1634 - RNA, 22 nt, Homo Sapiens
auugcacuccagcuugggcaac

SEQ ID NO: 1635 - RNA, 22 nt, Homo Sapiens
auugcacuucagccugggugac

SEQ ID NO: 1636 - RNA, 22 nt, Homo Sapiens
augccuguaaucccagcauuuu

SEQ ID NO: 1637 - RNA, 22 nt, Homo Sapiens
augccuguaaucccagcacuuu

SEQ ID NO: 1638 - RNA, 22 nt, Homo Sapiens
auggcucauguuuguagucuca

SEQ ID NO: 1639 - RNA, 22 nt, Homo Sapiens
augagaguaggaguuugggcuc

SEQ ID NO: 1640 - RNA, 22 nt, Homo Sapiens
aucuuucuuaauuccaggacuc

SEQ ID NO: 1641 - RNA, 22 nt, Homo Sapiens
augacacaguggggccaguugg

SEQ ID NO: 1642 - RNA, 22 nt, Homo Sapiens
ugagguaggugcugaaacugcu

SEQ ID NO: 1643 - RNA, 22 nt, Homo Sapiens
ugaggucauguucugucagguu

SEQ ID NO: 1644 - RNA, 21 nt, Homo Sapiens
ugagguaggugcugaaacugc

SEQ ID NO: 1645 - RNA, 22 nt, Homo Sapiens
ugagguaggaugauugcuagcu

SEQ ID NO: 1646 - RNA, 22 nt, Homo Sapiens
ugagggcaggugugaaaaugcu

SEQ ID NO: 1647 - RNA, 22 nt, Homo Sapiens
ugaggcagaaggauuacuugag

SEQ ID NO: 1648 - RNA, 22 nt, Homo Sapiens
ugagauggugucauauugcugg

SEQ ID NO: 1649 - RNA, 22 nt, Homo Sapiens
ugacucaguggaagauccagag

SEQ ID NO: 1650 - RNA, 22 nt, Homo Sapiens
ugcaagucugugauuuuguguu

SEQ ID NO: 1651 - RNA, 22 nt, Homo Sapiens
ugaggugaucagcaagguggag

SEQ ID NO: 1652 - RNA, 22 nt, Homo Sapiens
ugagguuaguaguuugagacca

SEQ ID NO: 1653 - RNA, 22 nt, Homo Sapiens
ugcaccacugcacuccagccug

SEQ ID NO: 1654 - RNA, 22 nt, Homo Sapiens
ugcaccaaugcacuccagccug

SEQ ID NO: 1655 - RNA, 22 nt, Homo Sapiens
ugcaccacugcacucuaaccug

SEQ ID NO: 1656 - RNA, 22 nt, Homo Sapiens
uccaaaaguggagaggaauaug

SEQ ID NO: 1657 - RNA, 22 nt, Homo Sapiens
uccaaaauuaaagguuguagaa

SEQ ID NO: 1658 - RNA, 22 nt, Homo Sapiens
ucagugcaaacuaagcagggca

SEQ ID NO: 1659 - RNA, 22 nt, Homo Sapiens
ucauaucauuuugaaagcugag

SEQ ID NO: 1660 - RNA, 22 nt, Homo Sapiens
ucacuguuccuuuuuguugaga

SEQ ID NO: 1661 - RNA, 22 nt, Homo Sapiens
ucacuugccuagggucacacag

SEQ ID NO: 1662 - RNA, 22 nt, Homo Sapiens
ucagaguaggcuugauguaauc

SEQ ID NO: 1663 - RNA, 22 nt, Homo Sapiens
ucgaguugaugcuagaaugggu

SEQ ID NO: 1664 - RNA, 22 nt, Homo Sapiens
uccauugcacuccagucugggc

SEQ ID NO: 1665 - RNA, 22 nt, Homo Sapiens
ucugagcccaggaguuugaggc

SEQ ID NO: 1666 - RNA, 22 nt, Homo Sapiens
ucugcugugauggacacuugua

SEQ ID NO: 1667 - RNA, 21 nt, Homo Sapiens
ucugcugugauggacacuugu

SEQ ID NO: 1668 - RNA, 22 nt, Homo Sapiens
ucuuucuuaaauggaugcauga

SEQ ID NO: 1669 - RNA, 22 nt, Homo Sapiens
ugggaagaugcuggcaaggugc

SEQ ID NO: 1670 - RNA, 22 nt, Homo Sapiens
uggcagauuugguugcuguugg

SEQ ID NO: 1671 - RNA, 22 nt, Homo Sapiens
uggagagaaagcgaagauguag

SEQ ID NO: 1672 - RNA, 22 nt, Homo Sapiens
uggaaagcauguacauuuggag

SEQ ID NO: 1673 - RNA, 22 nt, Homo Sapiens
ugcuacauuucuucauucuugg

SEQ ID NO: 1674 - RNA, 22 nt, Homo Sapiens
uggagagagcagguugcuaaga

SEQ ID NO: 1675 - RNA, 22 nt, Homo Sapiens
ugugccacugcacuccaugggu

SEQ ID NO: 1676 - RNA, 22 nt, Homo Sapiens
uguguuggagcagaggcagggg

SEQ ID NO: 1677 - RNA, 22 nt, Homo Sapiens
ugucauauagaauguucuauga

SEQ ID NO: 1678 - RNA, 22 nt, Homo Sapiens
ugugacucguacuuguaauccu

SEQ ID NO: 1679 - RNA, 22 nt, Homo Sapiens
uuaccauguuggccaggcuggu

SEQ ID NO: 1680 - RNA, 22 nt, Homo Sapiens
uguuauuuuguccaagagagag

SEQ ID NO: 1681 - RNA, 22 nt, Homo Sapiens
uuccaagccuuccccgggauca

SEQ ID NO: 1682 - RNA, 22 nt, Homo Sapiens
gcuggguugagcugggcugaga

SEQ ID NO: 1683 - RNA, 22 nt, Homo Sapiens
ggaaaguuaaagauguauguau

SEQ ID NO: 1684 - RNA, 22 nt, Homo Sapiens
ggacugagacaugauuaacuug

SEQ ID NO: 1685 - RNA, 22 nt, Homo Sapiens
ggagcuguaguuuuucccacau

SEQ ID NO: 1686 - RNA, 22 nt, Homo Sapiens
ggaagaaugugcuuuuguuguu

SEQ ID NO: 1687 - RNA, 22 nt, Homo Sapiens
ggaggcagugguugcagugagc

SEQ ID NO: 1688 - RNA, 22 nt, Homo Sapiens
gccuguaaucccagcuacuugg

SEQ ID NO: 1689 - RNA, 22 nt, Homo Sapiens
gcccaggagucugaggcuggag

SEQ ID NO: 1690 - RNA, 22 nt, Homo Sapiens
gccauugcacuccagccugggc

SEQ ID NO: 1691 - RNA, 22 nt, Homo Sapiens
gccauugcacuccagccuggac

SEQ ID NO: 1692 - RNA, 22 nt, Homo Sapiens
gcaggugugcaaaucacaacuu

SEQ ID NO: 1693 - RNA, 22 nt, Homo Sapiens
gauugcuugagcccuggagguu

SEQ ID NO: 1694 - RNA, 22 nt, Homo Sapiens
gcaagugcugucauauggaaga

SEQ ID NO: 1695 - RNA, 22 nt, Homo Sapiens
gcacucaagccuggguuacaga

SEQ ID NO: 1696 - RNA, 22 nt, Homo Sapiens
ggcaugauggagaggguggaga

SEQ ID NO: 1697 - RNA, 22 nt, Homo Sapiens
ggcaugauucagcagaggagag

SEQ ID NO: 1698 - RNA, 22 nt, Homo Sapiens
ggcccaggagggggagaaaggc

SEQ ID NO: 1699 - RNA, 22 nt, Homo Sapiens
ggcaaaaaaauagagcagaggg

SEQ ID NO: 1700 - RNA, 22 nt, Homo Sapiens
gguagcuuauuaaagaaacucc

SEQ ID NO: 1701 - RNA, 22 nt, Homo Sapiens
ggcugcagugcaacucuuucua

SEQ ID NO: 1702 - RNA, 22 nt, Homo Sapiens
ggcugcagugaacuaugaucgu

SEQ ID NO: 1703 - RNA, 22 nt, Homo Sapiens
ggcugggcaugguggcucacgc

SEQ ID NO: 1704 - RNA, 22 nt, Homo Sapiens
guacuccagccugccuggguaa

SEQ ID NO: 1705 - RNA, 22 nt, Homo Sapiens
gguucaauucaccggagucuca

SEQ ID NO: 1706 - RNA, 22 nt, Homo Sapiens
guguuauuaauaaacucuuuuu

SEQ ID NO: 1707 - RNA, 22 nt, Homo Sapiens
gugucacuuucaggagcucuaa

SEQ ID NO: 1708 - RNA, 22 nt, Homo Sapiens
guggcaccauuggagucuaagg

SEQ ID NO: 1709 - RNA, 22 nt, Homo Sapiens
ucacuguaaacucaaacuccug

SEQ ID NO: 1710 - RNA, 22 nt, Homo Sapiens
uaugaauguaaggaauguggga

SEQ ID NO: 1711 - RNA, 22 nt, Homo Sapiens
uaucgcuugagcccaggaguuu

SEQ ID NO: 1712 - RNA, 22 nt, Homo Sapiens
uauugcacuccagccugggcaa

SEQ ID NO: 1713 - RNA, 22 nt, Homo Sapiens
uauugcuaagaauucagguagu

SEQ ID NO: 1714 - RNA, 22 nt, Homo Sapiens
uaugagugugaugguguuugag

SEQ ID NO: 1715 - RNA, 22 nt, Homo Sapiens
uagcagaucugugacuccuaug

SEQ ID NO: 1716 - RNA, 22 nt, Homo Sapiens
uagcucauuuuugaaaucaguu

SEQ ID NO: 1717 - RNA, 21 nt, Homo Sapiens
uaagugaguaggcauuguucu

SEQ ID NO: 1718 - RNA, 22 nt, Homo Sapiens
uuugcacacuuuccaaguugcc

SEQ ID NO: 1719 - RNA, 22 nt, Homo Sapiens
uugguugcugaugagcuuugag

SEQ ID NO: 1720 - RNA, 22 nt, Homo Sapiens
uugccuaggcuggagugcagug

SEQ ID NO: 1721 - RNA, 22 nt, Homo Sapiens
uugguuggugaugagcauugaa

SEQ ID NO: 1722 - RNA, 22 nt, Homo Sapiens
uuuacagauggcaaagaucugg

SEQ ID NO: 1723 - RNA, 22 nt, Homo Sapiens
uuguuuuagaagaaggucagaa

SEQ ID NO: 1724 - RNA, 22 nt, Homo Sapiens
uugcaaggaaggggaggaggcu

SEQ ID NO: 1725 - RNA, 22 nt, Homo Sapiens
uugcacuccagccuggguaaca

SEQ ID NO: 1726 - RNA, 22 nt, Homo Sapiens
uugaugaaugggugcuccagga

SEQ ID NO: 1727 - RNA, 22 nt, Homo Sapiens
uugcacuccagccugggugaca

SEQ ID NO: 1728 - RNA, 22 nt, Homo Sapiens
uugcacuccagucugggugaca

SEQ ID NO: 1729 - RNA, 22 nt, Homo Sapiens
uucugccacugcauuccagccu

SEQ ID NO: 1730 - RNA, 22 nt, Homo Sapiens
uucuggugaauucaggauggua

SEQ ID NO: 1731 - RNA, 22 nt, Homo Sapiens
uugaugaaugggugcuccagga

SEQ ID NO: 1732 - RNA, 22 nt, Homo Sapiens
uugaggucaucuaaugguguug

SEQ ID NO: 1733 - RNA, 22 nt, Homo Sapiens
uugagcacaguuugaggagugu

SEQ ID NO: 1734 - RNA, 22 nt, Homo Sapiens
uugcuuugguucaaguuaggca

SEQ ID NO: 1735 - RNA, 21 nt, Homo Sapiens
uacaagugcuccaguacggcc

SEQ ID NO: 1736 - RNA, 22 nt, Homo Sapiens
uaggaaguauuuuuuaaaaaca

SEQ ID NO: 1737 - RNA, 22 nt, Homo Sapiens
uauuacauucauuuugaugguu

SEQ ID NO: 1738 - RNA, 22 nt, Homo Sapiens
gucuugaucuccugaccuugug

SEQ ID NO: 1739 - RNA, 22 nt, Homo Sapiens
gugcuuccauuuccccaucugu

SEQ ID NO: 1740 - RNA, 22 nt, Homo Sapiens
gggcgugaugucagccagaguc

SEQ ID NO: 1741 - RNA, 22 nt, Homo Sapiens
ggcccaggagggggagaaaggc

SEQ ID NO: 1742 - RNA, 22 nt, Homo Sapiens
ggaagaaugugcuuuuguuguu

SEQ ID NO: 1743 - RNA, 22 nt, Homo Sapiens
uuagggcaggcaugagagaacu

SEQ ID NO: 1744 - RNA, 22 nt, Homo Sapiens
uguguacuugucuuaguuugcu

SEQ ID NO: 1745 - RNA, 22 nt, Homo Sapiens
uggagaaauuauauuuuacuaa

SEQ ID NO: 1746 - RNA, 22 nt, Homo Sapiens
uggcucaguuugcucagcagug

SEQ ID NO: 1747 - RNA, 22 nt, Homo Sapiens
ucuuuuuguuguagcuguaugg

SEQ ID NO: 1748 - RNA, 22 nt, Homo Sapiens
ucauaucauuuugaaagcugag

SEQ ID NO: 1749 - RNA, 22 nt, Homo Sapiens
ugaggugaucagcaagguggag

SEQ ID NO: 1750 - RNA, 22 nt, Homo Sapiens
ugagagaggaaggccguaggga

SEQ ID NO: 1751 - RNA, 22 nt, Homo Sapiens
ugaggaaggugugagaaaugag

SEQ ID NO: 1752 - RNA, 22 nt, Homo Sapiens
ugagggggaaggugugugugug

SEQ ID NO: 1753 - RNA, 22 nt, Homo Sapiens
augguguaggugaagagaacau

SEQ ID NO: 1754 - RNA, 22 nt, Homo Sapiens
agagugugucuauggaaggggu

SEQ ID NO: 1755 - RNA, 22 nt, Homo Sapiens
aggaauauaauuaaaacuuugc

SEQ ID NO: 1756 - RNA, 22 nt, Homo Sapiens
aggccagagaggacucucuuuu

SEQ ID NO: 1757 - RNA, 22 nt, Homo Sapiens
aggugagaaaacugaggcucag

SEQ ID NO: 1758 - RNA, 22 nt, Homo Sapiens
aagcagccuuggaccaggaggg

SEQ ID NO: 1759 - RNA, 22 nt, Homo Sapiens
ccagaggugagucuugauuuug

SEQ ID NO: 1760 - RNA, 22 nt, Homo Sapiens
cuggcucuaauaaccugagcuu

SEQ ID NO: 1761 - RNA, 22 nt, Homo Sapiens
cugaauagaacagaagagcagc

SEQ ID NO: 1762 - RNA, 22 nt, Homo Sapiens
aggugagaaaacugaggcucag

SEQ ID NO: 1763 - RNA, 22 nt, Homo Sapiens
ugaggacaggagguugugaguu

SEQ ID NO: 1764 - RNA, 22 nt, Homo Sapiens
ugaggucauguucugucagguu

SEQ ID NO: 1765 - RNA, 22 nt, Homo Sapiens
ugaguguaugugugagagagaa

SEQ ID NO: 1766 - RNA, 22 nt, Homo Sapiens
uggucucuugaaagaggcucuu

SEQ ID NO: 1767 - RNA, 22 nt, Homo Sapiens
uggagagagcagguugcuaaga

SEQ ID NO: 1768 - RNA, 22 nt, Homo Sapiens
uuccaguucucagcacagcgcu

SEQ ID NO: 1769 - RNA, 22 nt, Homo Sapiens
gcagcuguuuauuuagaaccug

SEQ ID NO: 1770 - RNA, 22 nt, Homo Sapiens
ggccaggacucuugcagaacug

SEQ ID NO: 1771 - RNA, 22 nt, Homo Sapiens
guggcauuggugguggcauugg

SEQ ID NO: 1772 - RNA, 22 nt, Homo Sapiens
uagagcaccuguugugugugca

SEQ ID NO: 1773 - RNA, 22 nt, Homo Sapiens
uaaggagcacacaaccuagauu

SEQ ID NO: 1774 - RNA, 22 nt, Homo Sapiens
guaaagaaaucauaaaagucca

SEQ ID NO: 1775 - RNA, 22 nt, Homo Sapiens
gcagcaggcagggccaggcagg

SEQ ID NO: 1776 - RNA, 22 nt, Homo Sapiens
gcccaggagucugaggcuggag

SEQ ID NO: 1777 - RNA, 22 nt, Homo Sapiens
gcuucuccuguccccucccuac

SEQ ID NO: 1778 - RNA, 22 nt, Homo Sapiens
ugguuaguuuuaugggccugga

SEQ ID NO: 1779 - RNA, 22 nt, Homo Sapiens
ugguggggagaggcuugggaag

SEQ ID NO: 1780 - RNA, 22 nt, Homo Sapiens
ugcaccacuacacuccuaggca

SEQ ID NO: 1781 - RNA, 22 nt, Homo Sapiens
ucauccuuuucugcaaccuguu

SEQ ID NO: 1782 - RNA, 22 nt, Homo Sapiens
ucccucugccugcaguccugcu

SEQ ID NO: 1783 - RNA, 22 nt, Homo Sapiens
ucugguuuuaauccugaaggca

SEQ ID NO: 1784 - RNA, 22 nt, Homo Sapiens
ucugccucccugucucacucuc

SEQ ID NO: 1785 - RNA, 22 nt, Homo Sapiens
aucucauaggcccccagugggg

SEQ ID NO: 1786 - RNA, 22 nt, Homo Sapiens
auaagcacagggagguucuguc

SEQ ID NO: 1787 - RNA, 22 nt, Homo Sapiens
acucagagccauuccgcucagg

SEQ ID NO: 1788 - RNA, 22 nt, Homo Sapiens
cugaauguaaucuuaguuguaa

SEQ ID NO: 1789 - RNA, 22 nt, Homo Sapiens
cuggcucccucucuucucuccc

SEQ ID NO: 1790 - RNA, 22 nt, Homo Sapiens
cuuuuugggguuuggggcuugg

SEQ ID NO: 1791 - RNA, 22 nt, Homo Sapiens
cuuuuccugggucugggcugug

SEQ ID NO: 1792 - RNA, 22 nt, Homo Sapiens
cagagcugccuuucccuuccug

SEQ ID NO: 1793 - RNA, 22 nt, Homo Sapiens
uucucccugcccacacauccag

SEQ ID NO: 1794 - RNA, 22 nt, Homo Sapiens
uuuucugggcucccuuuucugc

SEQ ID NO: 1795 - RNA, 22 nt, Homo Sapiens
gagcuaaggauagaggugagga

SEQ ID NO: 1796 - RNA, 22 nt, Homo Sapiens
gagguagagguugcagugaguc

SEQ ID NO: 1797 - RNA, 22 nt, Homo Sapiens
gaggugaagaucuuggagucug

SEQ ID NO: 1798 - RNA, 22 nt, Homo Sapiens
acccacccucugugaggaggau

SEQ ID NO: 1799 - RNA, 22 nt, Homo Sapiens
acuggcacagacaucugucaag

SEQ ID NO: 1800 - RNA, 22 nt, Homo Sapiens
aagcugccauugaagaucuggg

SEQ ID NO: 1801 - RNA, 22 nt, Homo Sapiens
aaugcugugccagagcugcacc

SEQ ID NO: 1802 - RNA, 22 nt, Homo Sapiens
aacccuggaggcagagguugcg

SEQ ID NO: 1803 - RNA, 22 nt, Homo Sapiens
aacgaugggcuggauuguuuug

SEQ ID NO: 1804 - RNA, 22 nt, Homo Sapiens
aagagcugaguaauugggggca

SEQ ID NO: 1805 - RNA, 22 nt, Homo Sapiens
aguaagcaaacucaguuuaauc

SEQ ID NO: 1806 - RNA, 22 nt, Homo Sapiens
agcuacauugucugcuggguuu

SEQ ID NO: 1807 - RNA, 22 nt, Homo Sapiens
agagcuaggaagauacaggguu

SEQ ID NO: 1808 - RNA, 22 nt, Homo Sapiens
agagacacagacacaugggaga

SEQ ID NO: 1809 - RNA, 22 nt, Homo Sapiens
ucucacacucugauuucuugcu

SEQ ID NO: 1810 - RNA, 22 nt, Homo Sapiens
ucauaaacuggcaagcacuacc

SEQ ID NO: 1811 - RNA, 22 nt, Homo Sapiens
ucagugcaaacuaagcagggca

SEQ ID NO: 1812 - RNA, 22 nt, Homo Sapiens
ugauuggcaaugguuaugacgg

SEQ ID NO: 1813 - RNA, 22 nt, Homo Sapiens
ugaggacaggagguugugaguu

SEQ ID NO: 1814 - RNA, 22 nt, Homo Sapiens
ugagggcaggugugaaaaugcu

SEQ ID NO: 1815 - RNA, 22 nt, Homo Sapiens
uggggcacuguggaggugucau

SEQ ID NO: 1816 - RNA, 22 nt, Homo Sapiens
uggcuguuugggguugccgugu

SEQ ID NO: 1817 - RNA, 22 nt, Homo Sapiens
uggcagauuugguugcuguugg

SEQ ID NO: 1818 - RNA, 22 nt, Homo Sapiens
uggagagagcagguugcuaaga

SEQ ID NO: 1819 - RNA, 22 nt, Homo Sapiens
ggaaaguuaaagauguauguau

SEQ ID NO: 1820 - RNA, 22 nt, Homo Sapiens
gccaggaugaagaggaggagaa

SEQ ID NO: 1821 - RNA, 22 nt, Homo Sapiens
ggugaugcauuuaaaagggcag

SEQ ID NO: 1822 - RNA, 22 nt, Homo Sapiens
ggcaugugugagcagcugcagg

SEQ ID NO: 1823 - RNA, 22 nt, Homo Sapiens
gguggguuuccuuaauggcauc

SEQ ID NO: 1824 - RNA, 22 nt, Homo Sapiens
guccugagaacugcuccaguua

SEQ ID NO: 1825 - RNA, 22 nt, Homo Sapiens
guuuggcacugaaucauauaca

SEQ ID NO: 1826 - RNA, 22 nt, Homo Sapiens
guugggugugagggggguccca

SEQ ID NO: 1827 - RNA, 22 nt, Homo Sapiens
guguguggaaaugcagaugacc

SEQ ID NO: 1828 - RNA, 22 nt, Homo Sapiens
guggcauuggugguggcauugg

SEQ ID NO: 1829 - RNA, 22 nt, Homo Sapiens
gugaggcaggaaccccaaagcc

SEQ ID NO: 1830 - RNA, 22 nt, Homo Sapiens
guggcaagugaccagaugucac

SEQ ID NO: 1831 - RNA, 22 nt, Homo Sapiens
guauggagaucucugcccuugu

SEQ ID NO: 1832 - RNA, 22 nt, Homo Sapiens
gugcuuccauuuccccaucugu

SEQ ID NO: 1833 - RNA, 22 nt, Homo Sapiens
guacuccagccugccuggguaa

SEQ ID NO: 1834 - RNA, 22 nt, Homo Sapiens
uacaaauguuucuucuccuuuu

SEQ ID NO: 1835 - RNA, 22 nt, Homo Sapiens
uaccccgauagggagggugggg

SEQ ID NO: 1836 - RNA, 22 nt, Homo Sapiens
ggcaugauggagaggguggaga

SEQ ID NO: 1837 - RNA, 22 nt, Homo Sapiens
ggcaaggaagaaagcagaaguu

SEQ ID NO: 1838 - RNA, 22 nt, Homo Sapiens
ggaguguaaagaaggauguuac

SEQ ID NO: 1839 - RNA, 22 nt, Homo Sapiens
ggcacugagaagcaaacaggau

SEQ ID NO: 1840 - RNA, 22 nt, Homo Sapiens
gguccacaaggggagagcaggg

SEQ ID NO: 1841 - RNA, 22 nt, Homo Sapiens
ggcgugaucuuggcucaccaca

SEQ ID NO: 1842 - RNA, 22 nt, Homo Sapiens
gcugagaaaaccagguuaaugg

SEQ ID NO: 1843 - RNA, 22 nt, Homo Sapiens
gcagcaggcagggccaggcagg

SEQ ID NO: 1844 - RNA, 22 nt, Homo Sapiens
gcagcgcugagaugauuuguug

SEQ ID NO: 1845 - RNA, 22 nt, Homo Sapiens
gcugcuccugcucucccucucc

SEQ ID NO: 1846 - RNA, 22 nt, Homo Sapiens
ggaggaggaggcuggugcuggu

SEQ ID NO: 1847 - RNA, 22 nt, Homo Sapiens
uggagagagcagguugcuaaga

SEQ ID NO: 1848 - RNA, 22 nt, Homo Sapiens
ugcucuugcucuuucuucugga

SEQ ID NO: 1849 - RNA, 22 nt, Homo Sapiens
uggcagauuugguugcuguugg

SEQ ID NO: 1850 - RNA, 22 nt, Homo Sapiens
uggcaaggugugggcuagagau

SEQ ID NO: 1851 - RNA, 22 nt, Homo Sapiens
ugggaggcuacacguuucucca

SEQ ID NO: 1852 - RNA, 22 nt, Homo Sapiens
ugguggggagaggcuugggaag

SEQ ID NO: 1853 - RNA, 22 nt, Homo Sapiens
uguaggugguugagagaaugaa

SEQ ID NO: 1854 - RNA, 22 nt, Homo Sapiens
ugugagagaaauggcaaguugg

SEQ ID NO: 1855 - RNA, 22 nt, Homo Sapiens
ugcaccaaugcacuccagccug

SEQ ID NO: 1856 - RNA, 22 nt, Homo Sapiens
ucaguugauagcagaugcuguu

SEQ ID NO: 1857 - RNA, 22 nt, Homo Sapiens
ucccucugccugcaguccugcu

SEQ ID NO: 1858 - RNA, 22 nt, Homo Sapiens
ucugcuuggacugaucauugaa

SEQ ID NO: 1859 - RNA, 22 nt, Homo Sapiens
ucugccucccugucucacucuc

SEQ ID NO: 1860 - RNA, 22 nt, Homo Sapiens
ucuugggauagugucucauggc

SEQ ID NO: 1861 - RNA, 22 nt, Homo Sapiens
agagcuaggaagauacaggguu

SEQ ID NO: 1862 - RNA, 22 nt, Homo Sapiens
aggccagagaggacucucuuuu

SEQ ID NO: 1863 - RNA, 22 nt, Homo Sapiens
auaccagcacaguggaugggga

SEQ ID NO: 1864 - RNA, 22 nt, Homo Sapiens
aguggcccuggcccuggggcau

SEQ ID NO: 1865 - RNA, 22 nt, Homo Sapiens
augacacaguggggccaguugg

SEQ ID NO: 1866 - RNA, 22 nt, Homo Sapiens
augagaguaggaguuugggcuc

SEQ ID NO: 1867 - RNA, 22 nt, Homo Sapiens
auucccuuuagcucugauggca

SEQ ID NO: 1868 - RNA, 22 nt, Homo Sapiens
aagagcugaguaauugggggca

SEQ ID NO: 1869 - RNA, 22 nt, Homo Sapiens
aagagguaguguaaggaauugu

SEQ ID NO: 1870 - RNA, 22 nt, Homo Sapiens
acacaggcccagagaggcagug

SEQ ID NO: 1871 - RNA, 22 nt, Homo Sapiens
agaaggcucgcucucucagggg

SEQ ID NO: 1872 - RNA, 22 nt, Homo Sapiens
accugcauuccagccugcugac

SEQ ID NO: 1873 - RNA, 22 nt, Homo Sapiens
gauggcagcuggagguggagca

SEQ ID NO: 1874 - RNA, 22 nt, Homo Sapiens
gagguagagguugcagugaguc

SEQ ID NO: 1875 - RNA, 22 nt, Homo Sapiens
cuuccuggguucauauccuggu

SEQ ID NO: 1876 - RNA, 22 nt, Homo Sapiens
gacaagaggcacagacagcagg

SEQ ID NO: 1877 - RNA, 22 nt, Homo Sapiens
gaccagccauccugguuuacau

SEQ ID NO: 1878 - RNA, 21 nt, Homo Sapiens
gacacaggcccagagaggcag

SEQ ID NO: 1879 - RNA, 22 nt, Homo Sapiens
cugugccugugacgagggauga

SEQ ID NO: 1880 - RNA, 22 nt, Homo Sapiens
cucugagucugagagaguaggu

SEQ ID NO: 1881 - RNA, 22 nt, Homo Sapiens
caguggaugauguuuucugugg

SEQ ID NO: 1882 - RNA, 22 nt, Homo Sapiens
cacuuucagagaugcccugagu

SEQ ID NO: 1883 - RNA, 22 nt, Homo Sapiens
cgacucuugaccauggcugggg

SEQ ID NO: 1884 - RNA, 22 nt, Homo Sapiens
ccccaccccaguggagcucacc

SEQ ID NO: 1885 - RNA, 22 nt, Homo Sapiens
ccugcccauccugccuccacca

SEQ ID NO: 1886 - RNA, 22 nt, Homo Sapiens
uugccuaggcuggagugcagug

SEQ ID NO: 1887 - RNA, 22 nt, Homo Sapiens
uugugcuuguacugaccaugua

SEQ ID NO: 1888 - RNA, 22 nt, Homo Sapiens
uuuguaauagcaaaauacugga

SEQ ID NO: 1889 - RNA, 22 nt, Homo Sapiens
cagugggaaaaguuugucucau

SEQ ID NO: 1890 - RNA, 22 nt, Homo Sapiens
cagagcaguggagaguaggucu

SEQ ID NO: 1891 - RNA, 22 nt, Homo Sapiens
cucagugguucagacacuguuu

SEQ ID NO: 1892 - RNA, 22 nt, Homo Sapiens
cugggcgugugaggcggcugug

SEQ ID NO: 1893 - RNA, 22 nt, Homo Sapiens
gacaugauguagcagaugaugg

SEQ ID NO: 1894 - RNA, 22 nt, Homo Sapiens
gaccagccauccugguuuacau

SEQ ID NO: 1895 - RNA, 22 nt, Homo Sapiens
gaaacuaguguugggacaaagg

SEQ ID NO: 1896 - RNA, 22 nt, Homo Sapiens
accagcugugugaacuuaggaa

SEQ ID NO: 1897 - RNA, 22 nt, Homo Sapiens
aacccuggaggcagagguugcg

SEQ ID NO: 1898 - RNA, 22 nt, Homo Sapiens
aaauccuggggaucuggaggga

SEQ ID NO: 1899 - RNA, 22 nt, Homo Sapiens
augucagugaagaggucuggca

SEQ ID NO: 1900 - RNA, 22 nt, Homo Sapiens
aucuuucuuaauuccaggacuc

SEQ ID NO: 1901 - RNA, 22 nt, Homo Sapiens
aguggcuuugaaacuguaauga

SEQ ID NO: 1902 - RNA, 22 nt, Homo Sapiens
auauuguguauucaggauagca

SEQ ID NO: 1903 - RNA, 22 nt, Homo Sapiens
aggccuuuuugggaagagacag

SEQ ID NO: 1904 - RNA, 22 nt, Homo Sapiens
aggcugagugacugggaguuag

SEQ ID NO: 1905 - RNA, 22 nt, Homo Sapiens
aggugagaaaacugaggcucag

SEQ ID NO: 1906 - RNA, 22 nt, Homo Sapiens
agggaguuuacauguuuucuaa

SEQ ID NO: 1907 - RNA, 22 nt, Homo Sapiens
agaagaucccugcucugaguca

SEQ ID NO: 1908 - RNA, 22 nt, Homo Sapiens
agcaagaugguagcauuggaga

SEQ ID NO: 1909 - RNA, 22 nt, Homo Sapiens
agcuccaggagcuggcaggagg

SEQ ID NO: 1910 - RNA, 22 nt, Homo Sapiens
ucuuuuuugggagacggagucg

SEQ ID NO: 1911 - RNA, 22 nt, Homo Sapiens
uccaaaauuaaagguuguagaa

SEQ ID NO: 1912 - RNA, 22 nt, Homo Sapiens
ugauuguaugauauaugaguuu

SEQ ID NO: 1913 - RNA, 22 nt, Homo Sapiens
ugauggaggaaauggugguauc

SEQ ID NO: 1914 - RNA, 22 nt, Homo Sapiens
ugaucacaggcaaaggaauaaa

SEQ ID NO: 1915 - RNA, 22 nt, Homo Sapiens
ugaggacaggagguugugaguu

SEQ ID NO: 1916 - RNA, 22 nt, Homo Sapiens
ugaggucauguucugucagguu

SEQ ID NO: 1917 - RNA, 22 nt, Homo Sapiens
ugacagagguacauaggaggcu

SEQ ID NO: 1918 - RNA, 22 nt, Homo Sapiens
ugugagagaaauggcaaguugg

SEQ ID NO: 1919 - RNA, 22 nt, Homo Sapiens
ugugucuguggaacagaagcag

SEQ ID NO: 1920 - RNA, 22 nt, Homo Sapiens
uguaggugguugagagaaugaa

SEQ ID NO: 1921 - RNA, 22 nt, Homo Sapiens
ugugaaggaggaagggaggagc

SEQ ID NO: 1922 - RNA, 22 nt, Homo Sapiens
ugggaaacauccagcacauacu

SEQ ID NO: 1923 - RNA, 22 nt, Homo Sapiens
uggcacauaguaaguguucagu

SEQ ID NO: 1924 - RNA, 22 nt, Homo Sapiens
ugggcacauacugcaucauuua

SEQ ID NO: 1925 - RNA, 22 nt, Homo Sapiens
ugcucuugcucuuucuucugga

SEQ ID NO: 1926 - RNA, 22 nt, Homo Sapiens
ugcuguaguauguauauaguau

SEQ ID NO: 1927 - RNA, 22 nt, Homo Sapiens
ugcacuugucuuuacccuagag

SEQ ID NO: 1928 - RNA, 22 nt, Homo Sapiens
ggaggaggaggcuggugcuggu

SEQ ID NO: 1929 - RNA, 22 nt, Homo Sapiens
ggaagaaugugcuuuuguuguu

SEQ ID NO: 1930 - RNA, 22 nt, Homo Sapiens
gcugcuccugcucucccucucc

SEQ ID NO: 1931 - RNA, 22 nt, Homo Sapiens
gcugugguucugcaugaagaca

SEQ ID NO: 1932 - RNA, 22 nt, Homo Sapiens
gcagcuguuuauuuagaaccug

SEQ ID NO: 1933 - RNA, 22 nt, Homo Sapiens
gauaucaugggaagguguacuu

SEQ ID NO: 1934 - RNA, 22 nt, Homo Sapiens
ggcugcagugaacuaugaucgu

SEQ ID NO: 1935 - RNA, 22 nt, Homo Sapiens
ggaggaggugugaagaaaugaa

SEQ ID NO: 1936 - RNA, 22 nt, Homo Sapiens
ggcaugauggagaggguggaga

SEQ ID NO: 1937 - RNA, 22 nt, Homo Sapiens
uagcagcaggagcagguaacau

SEQ ID NO: 1938 - RNA, 22 nt, Homo Sapiens
uagcugccaggcaacaaguacg

SEQ ID NO: 1939 - RNA, 22 nt, Homo Sapiens
uagaaagcuaacaagcuagaga

SEQ ID NO: 1940 - RNA, 22 nt, Homo Sapiens
uacucauuuaugcauuguuuug

SEQ ID NO: 1941 - RNA, 22 nt, Homo Sapiens
uaugugagacacuguccuaggc

SEQ ID NO: 1942 - RNA, 22 nt, Homo Sapiens
uauaugucugguauucuugggg

SEQ ID NO: 1943 - RNA, 22 nt, Homo Sapiens
uaugaauguaaggaauguggga

SEQ ID NO: 1944 - RNA, 22 nt, Homo Sapiens
uagugcaagguuuugccaacuu

SEQ ID NO: 1945 - RNA, 22 nt, Homo Sapiens
guauguauuuauagauguucuu

SEQ ID NO: 1946 - RNA, 22 nt, Homo Sapiens
guaacaaaaugaauaauaccug

SEQ ID NO: 1947 - RNA, 22 nt, Homo Sapiens
guacaguggguguagggaccag

SEQ ID NO: 1948 - RNA, 22 nt, Homo Sapiens
gugagaauggaggaagaacagu

SEQ ID NO: 1949 - RNA, 22 nt, Homo Sapiens
gugggcugagaaaggcugccca

SEQ ID NO: 1950 - RNA, 22 nt, Homo Sapiens
guucuucugggagaaaaauggc

SEQ ID NO: 1951 - RNA, 22 nt, Homo Sapiens
gugugugauaaggacacagaua

SEQ ID NO: 1952 - RNA, 22 nt, Homo Sapiens
gucuuccuccguccccaccucc

SEQ ID NO: 1953 - RNA, 22 nt, Homo Sapiens
uaggcagucucaguuguugggu

SEQ ID NO: 1954 - RNA, 22 nt, Homo Sapiens
gcucccuugucuagggcgugga

SEQ ID NO: 1955 - RNA, 22 nt, Homo Sapiens
ggcaccaucucagcucacugga

SEQ ID NO: 1956 - RNA, 22 nt, Homo Sapiens
gggccaugacagggagauaggc

SEQ ID NO: 1957 - RNA, 22 nt, Homo Sapiens
gcugcugccucaacauuuuagg

SEQ ID NO: 1958 - RNA, 22 nt, Homo Sapiens
uggagaauuaaaaaggguagug

SEQ ID NO: 1959 - RNA, 22 nt, Homo Sapiens
uggagcagaaaggcaggagucc

SEQ ID NO: 1960 - RNA, 22 nt, Homo Sapiens
uggcucugucuauugggaugug

SEQ ID NO: 1961 - RNA, 22 nt, Homo Sapiens
ugucaguuuuuuaaauacucag

SEQ ID NO: 1962 - RNA, 22 nt, Homo Sapiens
ucagguuccugauuggaguucu

SEQ ID NO: 1963 - RNA, 22 nt, Homo Sapiens
aggcaguguuguuccugauugc

SEQ ID NO: 1964 - RNA, 22 nt, Homo Sapiens
agguccucacacacagcucugc

SEQ ID NO: 1965 - RNA, 22 nt, Homo Sapiens
agguagggaggguagaugcucu

SEQ ID NO: 1966 - RNA, 22 nt, Homo Sapiens
aacacguaguagguguucgaua

SEQ ID NO: 1967 - RNA, 22 nt, Homo Sapiens
gagcuaaggauagaggugagga

SEQ ID NO: 1968 - RNA, 22 nt, Homo Sapiens
cuggcucccucucuucucuccc

SEQ ID NO: 1969 - RNA, 22 nt, Homo Sapiens
cuuggcccugugaggcuucacc

SEQ ID NO: 1970 - RNA, 22 nt, Homo Sapiens
cuggugaggaaggagcagaguu

SEQ ID NO: 1971 - RNA, 22 nt, Homo Sapiens
cugugcccagccagggcugugu

SEQ ID NO: 1972 - RNA, 22 nt, Homo Sapiens
cucacugcaaccuccgccuccc

SEQ ID NO: 1973 - RNA, 22 nt, Homo Sapiens
cucagugugaagaacuacgggu

SEQ ID NO: 1974 - RNA, 22 nt, Homo Sapiens
cagaggaugcggcugggaacgg

SEQ ID NO: 1975 - RNA, 22 nt, Homo Sapiens
ccccaccccaguggagcucacc

SEQ ID NO: 1976 - RNA, 22 nt, Homo Sapiens
gaggagguggggcagcagcagg

SEQ ID NO: 1977 - RNA, 22 nt, Homo Sapiens
gauggcagcuggagguggagca

SEQ ID NO: 1978 - RNA, 22 nt, Homo Sapiens
gguccacaaggggagagcaggg

SEQ ID NO: 1979 - RNA, 19 nt, Homo Sapiens
gggggaugauagcagccag

SEQ ID NO: 1980 - RNA, 22 nt, Homo Sapiens
ggcgugaucuuggcucaccaca

SEQ ID NO: 1981 - RNA, 22 nt, Homo Sapiens
ggcaacaugcugaaaccccagc

SEQ ID NO: 1982 - RNA, 22 nt, Homo Sapiens
ggaagaaugugcuuuuguuguu

SEQ ID NO: 1983 - RNA, 22 nt, Homo Sapiens
uagugcaauggcgcgaucucgg

SEQ ID NO: 1984 - RNA, 22 nt, Homo Sapiens
ucacugcaaccucugcuucugg

SEQ ID NO: 1985 - RNA, 22 nt, Homo Sapiens
ucacugcaaccucugccuuccg

SEQ ID NO: 1986 - RNA, 22 nt, Homo Sapiens
ucccugagcccugaaggguguu

SEQ ID NO: 1987 - RNA, 22 nt, Homo Sapiens
ugaaagagauguggugugugaa

SEQ ID NO: 1988 - RNA, 22 nt, Homo Sapiens
ugauccucuggcuucagccucc

SEQ ID NO: 1989 - RNA, 22 nt, Homo Sapiens
uguaugcucugugaagcuuacu

SEQ ID NO: 1990 - RNA, 22 nt, Homo Sapiens
uucccagaaaccugugagugug

SEQ ID NO: 1991 - RNA, 22 nt, Homo Sapiens
gaggagguggggcagcagcagg

SEQ ID NO: 1992 - RNA, 22 nt, Homo Sapiens
cucugccucccgggucuaggcu

SEQ ID NO: 1993 - RNA, 22 nt, Homo Sapiens
cugugcccagccagggcugugu

SEQ ID NO: 1994 - RNA, 22 nt, Homo Sapiens
cugggauuacaggugugaacca

SEQ ID NO: 1995 - RNA, 22 nt, Homo Sapiens
ccaaagugcugggauuacaggc

SEQ ID NO: 1996 - RNA, 22 nt, Homo Sapiens
ccaaagugcuaggauuacagcc

SEQ ID NO: 1997 - RNA, 22 nt, Homo Sapiens
ccaaagugcuaggaauacaggu

SEQ ID NO: 1998 - RNA, 22 nt, Homo Sapiens
ccaaagugcuggcguuacaggu

SEQ ID NO: 1999 - RNA, 22 nt, Homo Sapiens
cacugggauuacagaugugagc

SEQ ID NO: 2000 - RNA, 22 nt, Homo Sapiens
caaagugcugagauuacaggca

SEQ ID NO: 2001 - RNA, 22 nt, Homo Sapiens
cacugcaaccucugccaccugg

SEQ ID NO: 2002 - RNA, 22 nt, Homo Sapiens
cacugcaaccucugccuccugg

SEQ ID NO: 2003 - RNA, 22 nt, Homo Sapiens
acaaccucugccuccuggguuc

SEQ ID NO: 2004 - RNA, 22 nt, Homo Sapiens
aagugcugguauuacaagugug

SEQ ID NO: 2005 - RNA, 22 nt, Homo Sapiens
aagugcugggauuacaggccug

SEQ ID NO: 2006 - RNA, 22 nt, Homo Sapiens
acuggcacagacaucugucaag

SEQ ID NO: 2007 - RNA, 22 nt, Homo Sapiens
agugauuuuccugccucagccu

SEQ ID NO: 2008 - RNA, 22 nt, Homo Sapiens
uuuuuguggaauauuuuuuuaa

SEQ ID NO: 2009 - RNA, 22 nt, Homo Sapiens
uugguuggugaugagcauugaa

SEQ ID NO: 2010 - RNA, 22 nt, Homo Sapiens
uugguugcugaugagcuuugag

SEQ ID NO: 2011 - RNA, 22 nt, Homo Sapiens
uucuggugaauucaggauggua

SEQ ID NO: 2012 - RNA, 22 nt, Homo Sapiens
uuugcaguguucaucaguauuu

SEQ ID NO: 2013 - RNA, 22 nt, Homo Sapiens
aggcugcaguguaguggcauga

SEQ ID NO: 2014 - RNA, 22 nt, Homo Sapiens
agcagcacagaaauauuggcac

SEQ ID NO: 2015 - RNA, 22 nt, Homo Sapiens
auuuggggaaauguguuucugg

SEQ ID NO: 2016 - RNA, 22 nt, Homo Sapiens
cauaaaaucagaaaguauuacu

SEQ ID NO: 2017 - RNA, 22 nt, Homo Sapiens
cucacugcaaccuccgccuccc

SEQ ID NO: 2018 - RNA, 22 nt, Homo Sapiens
ugcagccuugaacucuuucugg

SEQ ID NO: 2019 - RNA, 22 nt, Homo Sapiens
ucacugcaaccucugccuuccg

SEQ ID NO: 2020 - RNA, 22 nt, Homo Sapiens
uacgcugugcugugacauggua

SEQ ID NO: 2021 - RNA, 22 nt, Homo Sapiens
uaagugcugcugauuuuggaaa

SEQ ID NO: 2022 - RNA, 22 nt, Homo Sapiens
gucuuccagccuccaucuuucu

SEQ ID NO: 2023 - RNA, 22 nt, Homo Sapiens
guggcauuggugguggcauugg

SEQ ID NO: 2024 - RNA, 22 nt, Homo Sapiens
gcugcugccucaacauuuuagg

SEQ ID NO: 2025 - RNA, 22 nt, Homo Sapiens
gcuucuccuguccccucccuac

SEQ ID NO: 2026 - RNA, 22 nt, Homo Sapiens
gugggcugagaaaggcugccca

SEQ ID NO: 2027 - RNA, 22 nt, Homo Sapiens
ugacuggaggaagggagguaag

SEQ ID NO: 2028 - RNA, 22 nt, Homo Sapiens
uccagugauucauuugguuguu

SEQ ID NO: 2029 - RNA, 21 nt, Homo Sapiens
gacacaggcccagagaggcag

SEQ ID NO: 2030 - RNA, 22 nt, Homo Sapiens
agcuccaggagcuggcaggagg

SEQ ID NO: 2031 - RNA, 22 nt, Homo Sapiens
aggcugagugacugggaguuag

SEQ ID NO: 2032 - RNA, 22 nt, Homo Sapiens
agguggcacugugugggguggg

SEQ ID NO: 2033 - RNA, 22 nt, Homo Sapiens
agaaggcucgcucucucagggg

SEQ ID NO: 2034 - RNA, 20 nt, Homo Sapiens
acaggagcauggagaggcua

SEQ ID NO: 2035 - RNA, 22 nt, Homo Sapiens
acacaggcccagagaggcagug

SEQ ID NO: 2036 - RNA, 22 nt, Homo Sapiens
uuuguaauagcaaaauacugga

SEQ ID NO: 2037 - RNA, 22 nt, Homo Sapiens
accacagugucacagaguccau

SEQ ID NO: 2038 - RNA, 22 nt, Homo Sapiens
accuggccuguaggcaagucuu

SEQ ID NO: 2039 - RNA, 22 nt, Homo Sapiens
agucagggagacugucaguaaa

SEQ ID NO: 2040 - RNA, 22 nt, Homo Sapiens
auaccagcacaguggaugggga

SEQ ID NO: 2041 - RNA, 22 nt, Homo Sapiens
aggccagagaggacucucuuuu

SEQ ID NO: 2042 - RNA, 22 nt, Homo Sapiens
agauauggugaacagacagaug

SEQ ID NO: 2043 - RNA, 22 nt, Homo Sapiens
gaggacccuuaggucagacaga

SEQ ID NO: 2044 - RNA, 22 nt, Homo Sapiens
gagguuugagccuucuccugcu

SEQ ID NO: 2045 - RNA, 22 nt, Homo Sapiens
cuggcucccucucuucucuccc

SEQ ID NO: 2046 - RNA, 22 nt, Homo Sapiens
cacugcaacccccgccucccag

SEQ ID NO: 2047 - RNA, 22 nt, Homo Sapiens
ccagccugagguuccuggaggg

SEQ ID NO: 2048 - RNA, 22 nt, Homo Sapiens
cggcaagaugccggagugcugg

SEQ ID NO: 2049 - RNA, 22 nt, Homo Sapiens
cuagcacagugcuuggcacaca

SEQ ID NO: 2050 - RNA, 22 nt, Homo Sapiens
ucuuucuacaccucugccagug

SEQ ID NO: 2051 - RNA, 22 nt, Homo Sapiens
ucuuccccaccuucggcuugca

SEQ ID NO: 2052 - RNA, 22 nt, Homo Sapiens
ucucauauagcuggguugcagc

SEQ ID NO: 2053 - RNA, 22 nt, Homo Sapiens
ugacuggaggaagggagguaag

SEQ ID NO: 2054 - RNA, 22 nt, Homo Sapiens
ugccuaggcaggacggaaugca

SEQ ID NO: 2055 - RNA, 22 nt, Homo Sapiens
uucaguucuugaccugccccag

SEQ ID NO: 2056 - RNA, 22 nt, Homo Sapiens
ugggaugauguuaaacguacuc

SEQ ID NO: 2057 - RNA, 22 nt, Homo Sapiens
ugguccagaggaggaaugaggg

SEQ ID NO: 2058 - RNA, 22 nt, Homo Sapiens
uggaggcaggugcagauggagg

SEQ ID NO: 2059 - RNA, 22 nt, Homo Sapiens
ugcuaggcuuauucucuuccuc

SEQ ID NO: 2060 - RNA, 22 nt, Homo Sapiens
uaagaagagaaagaagaggcug

SEQ ID NO: 2061 - RNA, 22 nt, Homo Sapiens
gucuuccuccguccccaccucc

SEQ ID NO: 2062 - RNA, 22 nt, Homo Sapiens
gguucucaaaugagggacauuu

SEQ ID NO: 2063 - RNA, 22 nt, Homo Sapiens
uacaggcaggcacagaggcagu

SEQ ID NO: 2064 - RNA, 22 nt, Homo Sapiens
ucacugcaaccucugccuuccg

SEQ ID NO: 2065 - RNA, 22 nt, Homo Sapiens
gcuucuccuguccccucccuac

SEQ ID NO: 2066 - RNA, 22 nt, Homo Sapiens
gcagcaggcagggccaggcagg

SEQ ID NO: 2067 - RNA, 22 nt, Homo Sapiens
gcugagaccacccuugccugcc

SEQ ID NO: 2068 - RNA, 22 nt, Homo Sapiens
gggagaaaaggaggggauacag

SEQ ID NO: 2069 - RNA, 22 nt, Homo Sapiens
gggucucaaaugagggacauuu

SEQ ID NO: 2070 - RNA, 22 nt, Homo Sapiens
gggguuucuguaggcacuuuau

SEQ ID NO: 2071 - RNA, 22 nt, Homo Sapiens
ggcagcugugcagagugggggu

SEQ ID NO: 2072 - RNA, 22 nt, Homo Sapiens
ucacccaggcuggagugcagug

SEQ ID NO: 2073 - RNA, 22 nt, Homo Sapiens
uagcucauuuuugaaaucaguu

SEQ ID NO: 2074 - RNA, 22 nt, Homo Sapiens
gugggcugagaaaggcugccca

SEQ ID NO: 2075 - RNA, 22 nt, Homo Sapiens
uucaagaaagccaagauggcug

SEQ ID NO: 2076 - RNA, 22 nt, Homo Sapiens
uuaaagucaccauuuguggguu

SEQ ID NO: 2077 - RNA, 22 nt, Homo Sapiens
ugcaugaugcugagguuuggga

SEQ ID NO: 2078 - RNA, 22 nt, Homo Sapiens
ugaguauucaccaggugcuggg

SEQ ID NO: 2079 - RNA, 22 nt, Homo Sapiens
ugagguaggugcugaaacugcu

SEQ ID NO: 2080 - RNA, 22 nt, Homo Sapiens
ucugccucccugucucacucuc

SEQ ID NO: 2081 - RNA, 22 nt, Homo Sapiens
ccugggggccacuuugcacagg

SEQ ID NO: 2082 - RNA, 22 nt, Homo Sapiens
cccaggcuggagugcaguggug

SEQ ID NO: 2083 - RNA, 22 nt, Homo Sapiens
cuggcucuaauaaccugagcuu

SEQ ID NO: 2084 - RNA, 22 nt, Homo Sapiens
cugugcccagccagggcugugu

SEQ ID NO: 2085 - RNA, 22 nt, Homo Sapiens
cucacugcaaccuccgccuccc

SEQ ID NO: 2086 - RNA, 22 nt, Homo Sapiens
agcuggauuguuuaccuggggc

SEQ ID NO: 2087 - RNA, 22 nt, Homo Sapiens
aggcacugugcaggaugauggg

SEQ ID NO: 2088 - RNA, 22 nt, Homo Sapiens
aguauuucuuguuuuauugaga

SEQ ID NO: 2089 - RNA, 22 nt, Homo Sapiens
accuggccuguaggcaagucuu

SEQ ID NO: 2090 - RNA, 22 nt, Homo Sapiens
aagcagaacuguuuuguuuucu

SEQ ID NO: 2091 - RNA, 22 nt, Homo Sapiens
uugccuaggcuggagugcagug

SEQ ID NO: 2092 - RNA, 22 nt, Homo Sapiens
uugcccaggcuggagugcagug

SEQ ID NO: 2093 - RNA, 22 nt, Homo Sapiens
aggccagagaggacucucuuuu

SEQ ID NO: 2094 - RNA, 22 nt, Homo Sapiens
ugagagagcaagugaauuuccc

SEQ ID NO: 2095 - RNA, 22 nt, Homo Sapiens
ugcaugaugcugagguuuggga

SEQ ID NO: 2096 - RNA, 22 nt, Homo Sapiens
ugugcugguugcccccgagggg

SEQ ID NO: 2097 - RNA, 22 nt, Homo Sapiens
uaagauguuugcauuucagcac

SEQ ID NO: 2098 - RNA, 22 nt, Homo Sapiens
uauugcuaagaauucagguagu

SEQ ID NO: 2099 - RNA, 22 nt, Homo Sapiens
ggcuagaaagccagagagacag

SEQ ID NO: 2100 - RNA, 22 nt, Homo Sapiens
ggcuggagaguaaaucaggucu

SEQ ID NO: 2101 - RNA, 22 nt, Homo Sapiens
ggcccaggagggggagaaaggc

SEQ ID NO: 2102 - RNA, 22 nt, Homo Sapiens
gcuucuccuguccccucccuac

SEQ ID NO: 2103 - RNA, 22 nt, Homo Sapiens
gccuuuccuccagaacugcucc

SEQ ID NO: 2104 - RNA, 22 nt, Homo Sapiens
ggaggaggaggcuggugcuggu

SEQ ID NO: 2105 - RNA, 22 nt, Homo Sapiens
guugggguuucaguggcaguca

SEQ ID NO: 2106 - RNA, 22 nt, Homo Sapiens
uguguuggagcagaggcagggg

SEQ ID NO: 2107 - RNA, 22 nt, Homo Sapiens
uucacaguggcugaagcuguuc

SEQ ID NO: 2108 - RNA, 22 nt, Homo Sapiens
uuaguguucaggcucaaaugaa

SEQ ID NO: 2109 - RNA, 22 nt, Homo Sapiens
ugguccagaggaggaaugaggg

SEQ ID NO: 2110 - RNA, 22 nt, Homo Sapiens
uggcacagaucagcagaacagg

SEQ ID NO: 2111 - RNA, 22 nt, Homo Sapiens
ucugagcccaggaguuugaggc

SEQ ID NO: 2112 - RNA, 22 nt, Homo Sapiens
ucuuagauugagaagauguggc

SEQ ID NO: 2113 - RNA, 22 nt, Homo Sapiens
ucuuucuacaccucugccagug

SEQ ID NO: 2114 - RNA, 22 nt, Homo Sapiens
agggcaguggaucucugcaaag

SEQ ID NO: 2115 - RNA, 22 nt, Homo Sapiens
agguccucacacacagcucugc

SEQ ID NO: 2116 - RNA, 22 nt, Homo Sapiens
cugugggugagagagugggaga

SEQ ID NO: 2117 - RNA, 22 nt, Homo Sapiens
gaguacaaaugaagucuguggg

SEQ ID NO: 2118 - RNA, 22 nt, Homo Sapiens
gaggagguggggcagcagcagg

SEQ ID NO: 2119 - RNA, 21 nt, Homo Sapiens
cuuuggcaagggagaagucac

SEQ ID NO: 2120 - RNA, 22 nt, Homo Sapiens
cccaggagguggagguuacagu

SEQ ID NO: 2121 - RNA, 22 nt, Homo Sapiens
cacugcaaccucugccuccugg

SEQ ID NO: 2122 - RNA, 22 nt, Homo Sapiens
cacugcaaccucugccaccugg

SEQ ID NO: 2123 - RNA, 22 nt, Homo Sapiens
cacugcaaccuccaccuccugg

SEQ ID NO: 2124 - RNA, 22 nt, Homo Sapiens
cagagcugccuuucccuuccug

SEQ ID NO: 2125 - RNA, 22 nt, Homo Sapiens
uuguugcggguggggagaggau

SEQ ID NO: 2126 - RNA, 22 nt, Homo Sapiens
uuuucugggcucccuuuucugc

SEQ ID NO: 2127 - RNA, 22 nt, Homo Sapiens
uuuucugggcucccuuuucugc

SEQ ID NO: 2128 - RNA, 22 nt, Homo Sapiens
uuuguaauagcaaaauacugga

SEQ ID NO: 2129 - RNA, 22 nt, Homo Sapiens
uucuggugaauucaggauggua

SEQ ID NO: 2130 - RNA, 22 nt, Homo Sapiens
uucuaugauucucuaaguagca

SEQ ID NO: 2131 - RNA, 22 nt, Homo Sapiens
uucuuuuuccgcuuucugagcc

SEQ ID NO: 2132 - RNA, 22 nt, Homo Sapiens
uucucccugcccacacauccag

SEQ ID NO: 2133 - RNA, 22 nt, Homo Sapiens
uugagcaaaauaucugguuuca

SEQ ID NO: 2134 - RNA, 22 nt, Homo Sapiens
ccagaggugagucuugauuuug

SEQ ID NO: 2135 - RNA, 22 nt, Homo Sapiens
gacaugauguagcagaugaugg

SEQ ID NO: 2136 - RNA, 22 nt, Homo Sapiens
gauguugaugagcuugugugca

SEQ ID NO: 2137 - RNA, 22 nt, Homo Sapiens
cugugggugagagagugggaga

SEQ ID NO: 2138 - RNA, 22 nt, Homo Sapiens
cucugagucugagagaguaggu

SEQ ID NO: 2139 - RNA, 22 nt, Homo Sapiens
aggcacugugcaggaugauggg

SEQ ID NO: 2140 - RNA, 22 nt, Homo Sapiens
auaaagcagguuaacaaagcug

SEQ ID NO: 2141 - RNA, 22 nt, Homo Sapiens
ucagguuccugauuggaguucu

SEQ ID NO: 2142 - RNA, 22 nt, Homo Sapiens
ugguggggagaggcuugggaag

SEQ ID NO: 2143 - RNA, 22 nt, Homo Sapiens
uggagugucuggaggugucucu

SEQ ID NO: 2144 - RNA, 22 nt, Homo Sapiens
uguguacuugucuuaguuugcu

SEQ ID NO: 2145 - RNA, 22 nt, Homo Sapiens
gucuggaggcuggaaccuggug

SEQ ID NO: 2146 - RNA, 22 nt, Homo Sapiens
uaucacgugcagcuuugcugac

SEQ ID NO: 2147 - RNA, 22 nt, Homo Sapiens
uagguugugcgcuccuuaugag

SEQ ID NO: 2148 - RNA, 22 nt, Homo Sapiens
uaaguaaagagagaagccagaa

SEQ ID NO: 2149 - RNA, 22 nt, Homo Sapiens
ggcagcugugcagagugggggu

SEQ ID NO: 2150 - RNA, 22 nt, Homo Sapiens
gcuucuccuguccccucccuac

SEQ ID NO: 2151 - RNA, 22 nt, Homo Sapiens
uacaaauuccugggucuccugg

SEQ ID NO: 2152 - RNA, 22 nt, Homo Sapiens
ucuuugcuggaaggugccuccc

SEQ ID NO: 2153 - RNA, 22 nt, Homo Sapiens
acugggauaugaagacugugug

SEQ ID NO: 2154 - RNA, 22 nt, Homo Sapiens
uucuggguuuuuguggguuugc

SEQ ID NO: 2155 - RNA, 22 nt, Homo Sapiens
uucccucauucuccacccaguc

SEQ ID NO: 2156 - RNA, 22 nt, Homo Sapiens
acugcacuccauccuggggagc

SEQ ID NO: 2157 - RNA, 22 nt, Homo Sapiens
cuggcucuacccucucacuuca

SEQ ID NO: 2158 - RNA, 22 nt, Homo Sapiens
cuggguggccuucaguccauga

SEQ ID NO: 2159 - RNA, 22 nt, Homo Sapiens
ccaaagugcuggcguuacaggu

SEQ ID NO: 2160 - RNA, 22 nt, Homo Sapiens
ccuggagugacagguguagccu

SEQ ID NO: 2161 - RNA, 22 nt, Homo Sapiens
cuagcacagugcuuggcacaca

SEQ ID NO: 2162 - RNA, 22 nt, Homo Sapiens
ucccuucagagcccauggguuu

SEQ ID NO: 2163 - RNA, 22 nt, Homo Sapiens
uguggcuaguuugaacugagau

SEQ ID NO: 2164 - RNA, 22 nt, Homo Sapiens
uggagugucuggaggugucucu

SEQ ID NO: 2165 - RNA, 22 nt, Homo Sapiens
uggagaaauuauauuuuacuaa

SEQ ID NO: 2166 - RNA, 22 nt, Homo Sapiens
uaaggagugguuccaauuuggg

SEQ ID NO: 2167 - RNA, 22 nt, Homo Sapiens
uaggagugaaaauaaacucugu

SEQ ID NO: 2168 - RNA, 22 nt, Homo Sapiens
ucacccaguguaaacagcauga

SEQ ID NO: 2169 - RNA, 22 nt, Homo Sapiens
guauggagaucucugcccuugu

SEQ ID NO: 2170 - RNA, 22 nt, Homo Sapiens
gguucucaaaugagggacauuu

SEQ ID NO: 2171 - RNA, 22 nt, Homo Sapiens
gcaggugugcaaaucacaacuu

SEQ ID NO: 2172 - RNA, 22 nt, Homo Sapiens
ggcaugauggagaggguggaga

SEQ ID NO: 2173 - RNA, 22 nt, Homo Sapiens
guggaguucucugcuaguccua

SEQ ID NO: 2174 - RNA, 22 nt, Homo Sapiens
uucaggacuguggacugggcug

SEQ ID NO: 2175 - RNA, 22 nt, Homo Sapiens
cugcacuagaaggcacuauguu

SEQ ID NO: 2176 - RNA, 22 nt, Homo Sapiens
gacaagaggcacagacagcagg

SEQ ID NO: 2177 - RNA, 22 nt, Homo Sapiens
agaaggcucgcucucucagggg

SEQ ID NO: 2178 - RNA, 22 nt, Homo Sapiens
augggcaaauacugggagcugg

SEQ ID NO: 2179 - RNA, 22 nt, Homo Sapiens
agcaccacaacagggacugggc

SEQ ID NO: 2180 - RNA, 22 nt, Homo Sapiens
agauaguucucuguuguugggg

SEQ ID NO: 2181 - RNA, 22 nt, Homo Sapiens
agaggcagagguuacaguagug

SEQ ID NO: 2182 - RNA, 22 nt, Homo Sapiens
aggcaagagguugcagugagcu

SEQ ID NO: 2183 - RNA, 22 nt, Homo Sapiens
agguccucacacacagcucugc

SEQ ID NO: 2184 - RNA, 22 nt, Homo Sapiens
aggcugcaguguaguggcauga

SEQ ID NO: 2185 - RNA, 22 nt, Homo Sapiens
auugcacuucagccugggugac

SEQ ID NO: 2186 - RNA, 22 nt, Homo Sapiens
auugcacuccagcuugggcaac

SEQ ID NO: 2187 - RNA, 22 nt, Homo Sapiens
auugcacuccagccugggugac

SEQ ID NO: 2188 - RNA, 22 nt, Homo Sapiens
auugcacuccagccugggcaau

SEQ ID NO: 2189 - RNA, 22 nt, Homo Sapiens
augccacagcacuucagccuga

SEQ ID NO: 2190 - RNA, 22 nt, Homo Sapiens
augccuguaaucccagcacuuu

SEQ ID NO: 2191 - RNA, 22 nt, Homo Sapiens
augccuguaaucccagcauuuu

SEQ ID NO: 2192 - RNA, 22 nt, Homo Sapiens
augaccaggaauugagagacug

SEQ ID NO: 2193 - RNA, 22 nt, Homo Sapiens
agugagccgagauacauacaua

SEQ ID NO: 2194 - RNA, 22 nt, Homo Sapiens
agugagcuaugaucaugccggu

SEQ ID NO: 2195 - RNA, 22 nt, Homo Sapiens
agaaggcucgcucucucagggg

SEQ ID NO: 2196 - RNA, 22 nt, Homo Sapiens
acuguacuucagccuggguaac

SEQ ID NO: 2197 - RNA, 22 nt, Homo Sapiens
acuguacuccagccugggcaac

SEQ ID NO: 2198 - RNA, 22 nt, Homo Sapiens
acuguacuucagccugggcaac

SEQ ID NO: 2199 - RNA, 22 nt, Homo Sapiens
acuguacuccagccuaggcaac

SEQ ID NO: 2200 - RNA, 22 nt, Homo Sapiens
acuguacuccagccugggugac

SEQ ID NO: 2201 - RNA, 22 nt, Homo Sapiens
acugcacuccauccuggggagc

SEQ ID NO: 2202 - RNA, 22 nt, Homo Sapiens
acugcacuccugccuaggugac

SEQ ID NO: 2203 - RNA, 22 nt, Homo Sapiens
acugcacuccugccugggugac

SEQ ID NO: 2204 - RNA, 22 nt, Homo Sapiens
acugcacucuagccuaggugau

SEQ ID NO: 2205 - RNA, 22 nt, Homo Sapiens
acugcacucuagccugagcaac

SEQ ID NO: 2206 - RNA, 22 nt, Homo Sapiens
acugcacuucagccugggcaau

SEQ ID NO: 2207 - RNA, 22 nt, Homo Sapiens
acugcacucuagccugggcaac

SEQ ID NO: 2208 - RNA, 22 nt, Homo Sapiens
acugcacuccagccuaugggau

SEQ ID NO: 2209 - RNA, 22 nt, Homo Sapiens
acugcacuccagccuggcaaca

SEQ ID NO: 2210 - RNA, 22 nt, Homo Sapiens
acugcacuccagccuggguggc

SEQ ID NO: 2211 - RNA, 22 nt, Homo Sapiens
acugcacuccagccugggugac

SEQ ID NO: 2212 - RNA, 22 nt, Homo Sapiens
acugcacuccagccugggugau

SEQ ID NO: 2213 - RNA, 22 nt, Homo Sapiens
acugcacuccagccugggcgau

SEQ ID NO: 2214 - RNA, 22 nt, Homo Sapiens
acugcacuccagccuggcgaca

SEQ ID NO: 2215 - RNA, 22 nt, Homo Sapiens
acugcacuccagccuguugaca

SEQ ID NO: 2216 - RNA, 22 nt, Homo Sapiens
acugcacuccagucuaggugac

SEQ ID NO: 2217 - RNA, 22 nt, Homo Sapiens
acugcacuccagucugggugac

SEQ ID NO: 2218 - RNA, 22 nt, Homo Sapiens
acugcacuccauccugggacag

SEQ ID NO: 2219 - RNA, 22 nt, Homo Sapiens
acugcacuccauccugagugac

SEQ ID NO: 2220 - RNA, 22 nt, Homo Sapiens
aacccuggaggcagagguugcg

SEQ ID NO: 2221 - RNA, 22 nt, Homo Sapiens
aaagcuuuguucauuguaucug

SEQ ID NO: 2222 - RNA, 22 nt, Homo Sapiens
acaaaaaauacgaaaauuagcu

SEQ ID NO: 2223 - RNA, 22 nt, Homo Sapiens
aaugugaauguuguaugcagug

SEQ ID NO: 2224 - RNA, 22 nt, Homo Sapiens
aagguggugucauguuuugggg

SEQ ID NO: 2225 - RNA, 22 nt, Homo Sapiens
aaucccagcuacucgggaggcu

SEQ ID NO: 2226 - RNA, 22 nt, Homo Sapiens
gaccagccauccugguuuacau

SEQ ID NO: 2227 - RNA, 22 nt, Homo Sapiens
gagguagagguugcagugagug

SEQ ID NO: 2228 - RNA, 22 nt, Homo Sapiens
gagguagagguugcagugaguc

SEQ ID NO: 2229 - RNA, 22 nt, Homo Sapiens
cugaggucaggaguucgagacc

SEQ ID NO: 2230 - RNA, 22 nt, Homo Sapiens
cucugagucugagagaguaggu

SEQ ID NO: 2231 - RNA, 22 nt, Homo Sapiens
cucagauacuugggagguugag

SEQ ID NO: 2232 - RNA, 22 nt, Homo Sapiens
cuggaggauaacaaugauaaug

SEQ ID NO: 2233 - RNA, 22 nt, Homo Sapiens
cuugcacuccacagccugggug

SEQ ID NO: 2234 - RNA, 22 nt, Homo Sapiens
cugugcccagccagggcugugu

SEQ ID NO: 2235 - RNA, 22 nt, Homo Sapiens
cguguaaucccagcuacuuggg

SEQ ID NO: 2236 - RNA, 22 nt, Homo Sapiens
cccaggagguggagguuacagu

SEQ ID NO: 2237 - RNA, 22 nt, Homo Sapiens
ccuccuuucaucaaauucgagu

SEQ ID NO: 2238 - RNA, 22 nt, Homo Sapiens
cauugcacuccagccuggguga

SEQ ID NO: 2239 - RNA, 22 nt, Homo Sapiens
cauugcacuccagccuaggcaa

SEQ ID NO: 2240 - RNA, 22 nt, Homo Sapiens
cauugcacuccacccuaggcaa

SEQ ID NO: 2241 - RNA, 22 nt, Homo Sapiens
cccaggaggcggagguugcagu

SEQ ID NO: 2242 - RNA, 22 nt, Homo Sapiens
ccagccugagguuccuggaggg

SEQ ID NO: 2243 - RNA, 22 nt, Homo Sapiens
ccacugcacuccagccugggug

SEQ ID NO: 2244 - RNA, 22 nt, Homo Sapiens
cacugcacuccaaccuggacaa

SEQ ID NO: 2245 - RNA, 22 nt, Homo Sapiens
cacugcacucuagccucgguga

SEQ ID NO: 2246 - RNA, 22 nt, Homo Sapiens
cacugcacuguagccuccuggg

SEQ ID NO: 2247 - RNA, 22 nt, Homo Sapiens
cacugcacuccagccuggguga

SEQ ID NO: 2248 - RNA, 22 nt, Homo Sapiens
cacugcacuccagccuggguaa

SEQ ID NO: 2249 - RNA, 22 nt, Homo Sapiens
cacugcacuccagccugggcga

SEQ ID NO: 2250 - RNA, 22 nt, Homo Sapiens
cacugcacuccagccuaggcaa

SEQ ID NO: 2251 - RNA, 22 nt, Homo Sapiens
cacugcaaccucugccuccugg

SEQ ID NO: 2252 - RNA, 22 nt, Homo Sapiens
cacugcacuccacccugggcaa

SEQ ID NO: 2253 - RNA, 22 nt, Homo Sapiens
cacugcacuccagcccggcaac

SEQ ID NO: 2254 - RNA, 22 nt, Homo Sapiens
cacugcacucagccugggugac

SEQ ID NO: 2255 - RNA, 22 nt, Homo Sapiens
auuguucuccagccugggcgac

SEQ ID NO: 2256 - RNA, 22 nt, Homo Sapiens
auugcuugagcccaggaguuca

SEQ ID NO: 2257 - RNA, 22 nt, Homo Sapiens
auugcacaccaaccugggcaac

SEQ ID NO: 2258 - RNA, 22 nt, Homo Sapiens
caagugcuugaacauggcagag

SEQ ID NO: 2259 - RNA, 21 nt, Homo Sapiens
uucacccaucuuuccacccac

SEQ ID NO: 2260 - RNA, 22 nt, Homo Sapiens
ugugccacugcacuccaugggu

SEQ ID NO: 2261 - RNA, 22 nt, Homo Sapiens
ugugacucguacuuguaauccu

SEQ ID NO: 2262 - RNA, 22 nt, Homo Sapiens
ugcucuugcucuuucuucugga

SEQ ID NO: 2263 - RNA, 22 nt, Homo Sapiens
ugcugugcuaaaggaaggauua

SEQ ID NO: 2264 - RNA, 22 nt, Homo Sapiens
uggagccuuguuguuuguucac

SEQ ID NO: 2265 - RNA, 22 nt, Homo Sapiens
uggagcagaaaggcaggagucc

SEQ ID NO: 2266 - RNA, 22 nt, Homo Sapiens
ugggaaacauccagcacauacu

SEQ ID NO: 2267 - RNA, 22 nt, Homo Sapiens
ucccuucagagcccauggguuu

SEQ ID NO: 2268 - RNA, 22 nt, Homo Sapiens
uccauugcacuccagucugggc

SEQ ID NO: 2269 - RNA, 22 nt, Homo Sapiens
ucugucauuuuucucuuuccau

SEQ ID NO: 2270 - RNA, 22 nt, Homo Sapiens
ucugagcccaggaguuugaggc

SEQ ID NO: 2271 - RNA, 22 nt, Homo Sapiens
ucucacacucugauuucuugcu

SEQ ID NO: 2272 - RNA, 22 nt, Homo Sapiens
ugcgccccuguacucugggcaa

SEQ ID NO: 2273 - RNA, 22 nt, Homo Sapiens
ugcaccaaugcacuccagccug

SEQ ID NO: 2274 - RNA, 22 nt, Homo Sapiens
ugcaccacugcacuccagccug

SEQ ID NO: 2275 - RNA, 22 nt, Homo Sapiens
ugcaccacugcacucuaaccug

SEQ ID NO: 2276 - RNA, 22 nt, Homo Sapiens
ugauucauuucuaaacccagcu

SEQ ID NO: 2277 - RNA, 22 nt, Homo Sapiens
gugcuugaccaugugguggcag

SEQ ID NO: 2278 - RNA, 22 nt, Homo Sapiens
guggcauuggugguggcauugg

SEQ ID NO: 2279 - RNA, 22 nt, Homo Sapiens
gugugggcagggccgugcuccc

SEQ ID NO: 2280 - RNA, 22 nt, Homo Sapiens
guacacauuuucauguuaccau

SEQ ID NO: 2281 - RNA, 22 nt, Homo Sapiens
guacuccagccugccuggguaa

SEQ ID NO: 2282 - RNA, 22 nt, Homo Sapiens
uaucgcuugagcccaggaguuu

SEQ ID NO: 2283 - RNA, 22 nt, Homo Sapiens
uauugcacuccagccugggcaa

SEQ ID NO: 2284 - RNA, 22 nt, Homo Sapiens
uauggcaaagucacugauuucc

SEQ ID NO: 2285 - RNA, 22 nt, Homo Sapiens
uaggagugaaaauaaacucugu

SEQ ID NO: 2286 - RNA, 22 nt, Homo Sapiens
uacaugugcccaguggcugcug

SEQ ID NO: 2287 - RNA, 22 nt, Homo Sapiens
uaccagugucagcuuccugugu

SEQ ID NO: 2288 - RNA, 22 nt, Homo Sapiens
ggcccaggagggggagaaaggc

SEQ ID NO: 2289 - RNA, 22 nt, Homo Sapiens
ggcaacaugcugaaaccccagc

SEQ ID NO: 2290 - RNA, 22 nt, Homo Sapiens
ggcugggcaugguggcucacgc

SEQ ID NO: 2291 - RNA, 22 nt, Homo Sapiens
ggcugcagugaacuaugaucgu

SEQ ID NO: 2292 - RNA, 22 nt, Homo Sapiens
ggccugguggcuguuguuuugg

SEQ ID NO: 2293 - RNA, 22 nt, Homo Sapiens
ggccugaggucagcaguagagg

SEQ ID NO: 2294 - RNA, 22 nt, Homo Sapiens
gggcaugaugauggcacuagcg

SEQ ID NO: 2295 - RNA, 22 nt, Homo Sapiens
gccauugcacuccagccuggac

SEQ ID NO: 2296 - RNA, 22 nt, Homo Sapiens
gccauugcacuccagccugggc

SEQ ID NO: 2297 - RNA, 22 nt, Homo Sapiens
gccuguaaucccagcuacuugg

SEQ ID NO: 2298 - RNA, 22 nt, Homo Sapiens
gcacucaagccuggguuacaga

SEQ ID NO: 2299 - RNA, 22 nt, Homo Sapiens
ggaggcagugguugcagugagc

SEQ ID NO: 2300 - RNA, 22 nt, Homo Sapiens
ggacugcagucacacucuaaga

SEQ ID NO: 2301 - RNA, 22 nt, Homo Sapiens
uucugccacugcauuccagccu

SEQ ID NO: 2302 - RNA, 22 nt, Homo Sapiens
uugagaaugcuguaauuggagg

SEQ ID NO: 2303 - RNA, 22 nt, Homo Sapiens
uugagcacaguuugaggagugu

SEQ ID NO: 2304 - RNA, 22 nt, Homo Sapiens
uugcaauagugaaaaaacugaa

SEQ ID NO: 2305 - RNA, 22 nt, Homo Sapiens
uugcacuccagccuggguaaca

SEQ ID NO: 2306 - RNA, 22 nt, Homo Sapiens
uugcacuccagucugggugaca

SEQ ID NO: 2307 - RNA, 22 nt, Homo Sapiens
uugcacuccagccugggugaca

SEQ ID NO: 2308 - RNA, 22 nt, Homo Sapiens
uuguuuuagaagaaggucagaa

SEQ ID NO: 2309 - RNA, 22 nt, Homo Sapiens
uuuaagcuauaguuccaggccc

SEQ ID NO: 2310 - RNA, 22 nt, Homo Sapiens
uuguugcggguggggagaggau

SEQ ID NO: 2311 - RNA, 22 nt, Homo Sapiens
uuugcacacuuuccaaguugcc

SEQ ID NO: 2312 - RNA, 22 nt, Homo Sapiens
ggagcuguaguuuuucccacau

SEQ ID NO: 2313 - RNA, 22 nt, Homo Sapiens
gcuguguuaacuguucaaacuc

SEQ ID NO: 2314 - RNA, 22 nt, Homo Sapiens
ggugaugcauuuaaaagggcag

SEQ ID NO: 2315 - RNA, 22 nt, Homo Sapiens
ggcuggagaguaaaucaggucu

SEQ ID NO: 2316 - RNA, 22 nt, Homo Sapiens
ucugucauuuuucucuuuccau

SEQ ID NO: 2317 - RNA, 22 nt, Homo Sapiens
uggcagauuugguugcuguugg

SEQ ID NO: 2318 - RNA, 22 nt, Homo Sapiens
uuccaguucucagcacagcgcu

SEQ ID NO: 2319 - RNA, 22 nt, Homo Sapiens
cugugagcuauuuguuuugguu

SEQ ID NO: 2320 - RNA, 22 nt, Homo Sapiens
gaacagcuccagucuacagccc

SEQ ID NO: 2321 - RNA, 22 nt, Homo Sapiens
acugcacuccugccuaggugac

SEQ ID NO: 2322 - RNA, 22 nt, Homo Sapiens
aggcagucuugauuagcuucua

SEQ ID NO: 2323 - RNA, 22 nt, Homo Sapiens
aggcagagagguauuuaggcau

SEQ ID NO: 2324 - RNA, 22 nt, Homo Sapiens
agcaagaugguagcauuggaga

SEQ ID NO: 2325 - RNA, 22 nt, Homo Sapiens
agcugguguguagcggguaccu

SEQ ID NO: 2326 - RNA, 22 nt, Homo Sapiens
agcugugagccugccuuccagu

SEQ ID NO: 2327 - RNA, 22 nt, Homo Sapiens
aggugggguuucaccauguugg

SEQ ID NO: 2328 - RNA, 22 nt, Homo Sapiens
augucagugaagaggucuggca

SEQ ID NO: 2329 - RNA, 22 nt, Homo Sapiens
acugcacuccagccuggguggc

SEQ ID NO: 2330 - RNA, 22 nt, Homo Sapiens
aagguggugucauguuuugggg

SEQ ID NO: 2331 - RNA, 22 nt, Homo Sapiens
aaggcuguguaggcagaauucu

SEQ ID NO: 2332 - RNA, 22 nt, Homo Sapiens
aauuuagaaucguuucugauag

SEQ ID NO: 2333 - RNA, 22 nt, Homo Sapiens
gacaagaggcacagacagcagg

SEQ ID NO: 2334 - RNA, 22 nt, Homo Sapiens
gaggagguggggcagcagcagg

SEQ ID NO: 2335 - RNA, 22 nt, Homo Sapiens
gagggaagcaugggaccaugau

SEQ ID NO: 2336 - RNA, 22 nt, Homo Sapiens
cugggcgugugaggcggcugug

SEQ ID NO: 2337 - RNA, 22 nt, Homo Sapiens
cucaccaguuacucuccaguug

SEQ ID NO: 2338 - RNA, 22 nt, Homo Sapiens
auuugaggaggcuuuacagcca

SEQ ID NO: 2339 - RNA, 22 nt, Homo Sapiens
cagagcugccuuucccuuccug

SEQ ID NO: 2340 - RNA, 22 nt, Homo Sapiens
ccugcccauccugccuccacca

SEQ ID NO: 2341 - RNA, 22 nt, Homo Sapiens
ccucuccauguacccauucccc

SEQ ID NO: 2342 - RNA, 22 nt, Homo Sapiens
uuccccaugugaugcuauugcu

SEQ ID NO: 2343 - RNA, 21 nt, Homo Sapiens
uucacccaucuuuccacccac

SEQ ID NO: 2344 - RNA, 22 nt, Homo Sapiens
uucacccaucuuuccacccacg

SEQ ID NO: 2345 - RNA, 22 nt, Homo Sapiens
uuagcaguugugagacccuaga

SEQ ID NO: 2346 - RNA, 22 nt, Homo Sapiens
uggauuaguaaagaagaaugaa

SEQ ID NO: 2347 - RNA, 22 nt, Homo Sapiens
ugggaagaugcuggcaaggugc

SEQ ID NO: 2348 - RNA, 22 nt, Homo Sapiens
ugguccagaggaggaaugaggg

SEQ ID NO: 2349 - RNA, 22 nt, Homo Sapiens
ugcuaggcuuauucucuuccuc

SEQ ID NO: 2350 - RNA, 22 nt, Homo Sapiens
uccauugcacuccagucugggc

SEQ ID NO: 2351 - RNA, 22 nt, Homo Sapiens
uccagggugggccucagacccu

SEQ ID NO: 2352 - RNA, 22 nt, Homo Sapiens
ugaugcuugagcacaguaccuc

SEQ ID NO: 2353 - RNA, 22 nt, Homo Sapiens
ugaguuuaagcuaagaagucug

SEQ ID NO: 2354 - RNA, 22 nt, Homo Sapiens
ugcaugcucuucaugagaaucu

SEQ ID NO: 2355 - RNA, 22 nt, Homo Sapiens
ugacaagauacaggguagugaa

SEQ ID NO: 2356 - RNA, 22 nt, Homo Sapiens
ggcagugucauuagcugauugu

SEQ ID NO: 2357 - RNA, 22 nt, Homo Sapiens
ggcaugauggagaggguggaga

SEQ ID NO: 2358 - RNA, 22 nt, Homo Sapiens
ggaaaacaaguaccccuggaac

SEQ ID NO: 2359 - RNA, 22 nt, Homo Sapiens
gcugcuccugcucucccucucc

SEQ ID NO: 2360 - RNA, 22 nt, Homo Sapiens
ggaggaggaggcuggugcuggu

SEQ ID NO: 2361 - RNA, 22 nt, Homo Sapiens
uacaguucugguuucuucuuua

SEQ ID NO: 2362 - RNA, 22 nt, Homo Sapiens
uaacuggccuuggaaccuguag

SEQ ID NO: 2363 - RNA, 22 nt, Homo Sapiens
uagcagcaggagcagguaacau

SEQ ID NO: 2364 - RNA, 22 nt, Homo Sapiens
uaugagugugaugguguuugag

SEQ ID NO: 2365 - RNA, 22 nt, Homo Sapiens
uaucucuugccuugaccuccua

SEQ ID NO: 2366 - RNA, 22 nt, Homo Sapiens
uauuggguuuaaagucaccguu

SEQ ID NO: 2367 - RNA, 22 nt, Homo Sapiens
gguucucaaaugagggacauuu

SEQ ID NO: 2368 - RNA, 22 nt, Homo Sapiens
gugcuuccauuuccccaucugu

SEQ ID NO: 2369 - RNA, 22 nt, Homo Sapiens
guucugcugagauacgugcucu

SEQ ID NO: 2370 - RNA, 22 nt, Homo Sapiens
guuacagcucucaaagaagaca

SEQ ID NO: 2371 - RNA, 22 nt, Homo Sapiens
uuguuuuagaagaaggucagaa

SEQ ID NO: 2372 - RNA, 22 nt, Homo Sapiens
uuggugcaaauggcauuuccau

SEQ ID NO: 2373 - RNA, 22 nt, Homo Sapiens
uuccuucagcccuagcugcuuu

SEQ ID NO: 2374 - RNA, 22 nt, Homo Sapiens
gugaggcaggaaccccaaagcc

SEQ ID NO: 2375 - RNA, 22 nt, Homo Sapiens
ggugcagaucauggauagagcu

SEQ ID NO: 2376 - RNA, 22 nt, Homo Sapiens
gccauugcacuccagccugggc

SEQ ID NO: 2377 - RNA, 22 nt, Homo Sapiens
gggccaugacagggagauaggc

SEQ ID NO: 2378 - RNA, 22 nt, Homo Sapiens
ugaguauucaccaggugcuggg

SEQ ID NO: 2379 - RNA, 22 nt, Homo Sapiens
ucacuugccuagggucacacag

SEQ ID NO: 2380 - RNA, 22 nt, Homo Sapiens
ucuuugcuggaaggugccuccc

SEQ ID NO: 2381 - RNA, 21 nt, Homo Sapiens
ucugcugugauggacacuugu

SEQ ID NO: 2382 - RNA, 22 nt, Homo Sapiens
ucugcugugauggacacuugua

SEQ ID NO: 2383 - RNA, 22 nt, Homo Sapiens
ucugccucccugucucacucuc

SEQ ID NO: 2384 - RNA, 22 nt, Homo Sapiens
uggagagauagugauuuagcuc

SEQ ID NO: 2385 - RNA, 22 nt, Homo Sapiens
uggcucugugcuucuaguaucu

SEQ ID NO: 2386 - RNA, 22 nt, Homo Sapiens
uggcucaguuugcucagcagug

SEQ ID NO: 2387 - RNA, 22 nt, Homo Sapiens
caucucagucuauguccuugcu

SEQ ID NO: 2388 - RNA, 22 nt, Homo Sapiens
cagaaucuuuugucucugagaa

SEQ ID NO: 2389 - RNA, 22 nt, Homo Sapiens
cuggcucccucucuucucuccc

SEQ ID NO: 2390 - RNA, 22 nt, Homo Sapiens
cuucaaugcuugagaagucgua

SEQ ID NO: 2391 - RNA, 22 nt, Homo Sapiens
acugcagcuucagggacuugug

SEQ ID NO: 2392 - RNA, 22 nt, Homo Sapiens
agaaugaaaggcaguuccuagc

SEQ ID NO: 2393 - RNA, 22 nt, Homo Sapiens
acaguguuacccaggcuggucu

SEQ ID NO: 2394 - RNA, 22 nt, Homo Sapiens
agugauuuuccugccucagccu

SEQ ID NO: 2395 - RNA, 22 nt, Homo Sapiens
agcagcgcagguagauggggcu

SEQ ID NO: 2396 - RNA, 22 nt, Homo Sapiens
cuggaagacaugguagagcuga

SEQ ID NO: 2397 - RNA, 22 nt, Homo Sapiens
gaggcgggaagcccacuaggag

SEQ ID NO: 2398 - RNA, 22 nt, Homo Sapiens
ucugccucccugucucacucuc

SEQ ID NO: 2399 - RNA, 22 nt, Homo Sapiens
ugcaccacuacacuccuaggca

SEQ ID NO: 2400 - RNA, 22 nt, Homo Sapiens
ugccuaggcaggacggaaugca

SEQ ID NO: 2401 - RNA, 22 nt, Homo Sapiens
guuuggcacugaaucauauaca

SEQ ID NO: 2402 - RNA, 22 nt, Homo Sapiens
uauuuguuuuuaaugcugggug

SEQ ID NO: 2403 - RNA, 22 nt, Homo Sapiens
uacaaauuccugggucuccugg

SEQ ID NO: 2404 - RNA, 22 nt, Homo Sapiens
ggugaugcauuuaaaagggcag

SEQ ID NO: 2405 - RNA, 22 nt, Homo Sapiens
gcacacaccuccuugcaguggc

SEQ ID NO: 2406 - RNA, 22 nt, Homo Sapiens
ucugccucccugucucacucuc

SEQ ID NO: 2407 - RNA, 22 nt, Homo Sapiens
ucccugggacaacuuucuuauu

SEQ ID NO: 2408 - RNA, 22 nt, Homo Sapiens
uggcucaguuugcucagcagug

SEQ ID NO: 2409 - RNA, 22 nt, Homo Sapiens
ugcuaggcuuauucucuuccuc

SEQ ID NO: 2410 - RNA, 21 nt, Homo Sapiens
gacacaggcccagagaggcag

SEQ ID NO: 2411 - RNA, 22 nt, Homo Sapiens
agcuccaggagcuggcaggagg

SEQ ID NO: 2412 - RNA, 22 nt, Homo Sapiens
agauggagaaguguuuucagau

SEQ ID NO: 2413 - RNA, 22 nt, Homo Sapiens
auuagcuauagcaaaaggcuua

SEQ ID NO: 2414 - RNA, 22 nt, Homo Sapiens
acacaggcccagagaggcagug

SEQ ID NO: 2415 - RNA, 22 nt, Homo Sapiens
aaguuuuuuuaaauuagcuagg

SEQ ID NO: 2416 - RNA, 22 nt, Homo Sapiens
cugggcgugugaggcggcugug

SEQ ID NO: 2417 - RNA, 22 nt, Homo Sapiens
cuagacugaagcuuuaugagga

SEQ ID NO: 2418 - RNA, 22 nt, Homo Sapiens
ccugggggccacuuugcacagg

SEQ ID NO: 2419 - RNA, 22 nt, Homo Sapiens
gcagcaggcagggccaggcagg

SEQ ID NO: 2420 - RNA, 22 nt, Homo Sapiens
gcaggaugguuggacugaaggg

SEQ ID NO: 2421 - RNA, 22 nt, Homo Sapiens
ggccaggacucuugcagaacug

SEQ ID NO: 2422 - RNA, 22 nt, Homo Sapiens
uuuggauuccugguuccuacag

SEQ ID NO: 2423 - RNA, 22 nt, Homo Sapiens
uuugcagcuuccaaauuucuga

SEQ ID NO: 2424 - RNA, 22 nt, Homo Sapiens
ggccugaggucagcaguagagg

SEQ ID NO: 2425 - RNA, 22 nt, Homo Sapiens
gguccacaaggggagagcaggg

SEQ ID NO: 2426 - RNA, 22 nt, Homo Sapiens
ggcaugauggagaggguggaga

SEQ ID NO: 2427 - RNA, 22 nt, Homo Sapiens
ggcaggauggagcagggcuaaa

SEQ ID NO: 2428 - RNA, 22 nt, Homo Sapiens
uggaauggcugaagacugugaa

SEQ ID NO: 2429 - RNA, 22 nt, Homo Sapiens
ugccuaggcaggacggaaugca

SEQ ID NO: 2430 - RNA, 22 nt, Homo Sapiens
ugaggcaggaguuggcaagagg

SEQ ID NO: 2431 - RNA, 22 nt, Homo Sapiens
ccagccugagguuccuggaggg

SEQ ID NO: 2432 - RNA, 22 nt, Homo Sapiens
auuuuucugcauuuguauugga

SEQ ID NO: 2433 - RNA, 22 nt, Homo Sapiens
cuggcugcauuuaggaacaagg

SEQ ID NO: 2434 - RNA, 22 nt, Homo Sapiens
cugaggcaggagggcucaggag

SEQ ID NO: 2435 - RNA, 22 nt, Homo Sapiens
gagagugcuuuggguguaggcc

SEQ ID NO: 2436 - RNA, 22 nt, Homo Sapiens
acacaggcccagagaggcagug

SEQ ID NO: 2437 - RNA, 22 nt, Homo Sapiens
aauggcagucccuggagcagga

SEQ ID NO: 2438 - RNA, 22 nt, Homo Sapiens
agaagguuggggcuggaggucu

SEQ ID NO: 2439 - RNA, 22 nt, Homo Sapiens
aggcugagugacugggaguuag

SEQ ID NO: 2440 - RNA, 22 nt, Homo Sapiens
agaagguuggggcuggaggucu

SEQ ID NO: 2441 - RNA, 22 nt, Homo Sapiens
aaaguggcuggaguggagucuu

SEQ ID NO: 2442 - RNA, 22 nt, Homo Sapiens
aaccugcugguaaagcacuggc

SEQ ID NO: 2443 - RNA, 22 nt, Homo Sapiens
gagauccuuucacaguuguggu

SEQ ID NO: 2444 - RNA, 22 nt, Homo Sapiens
gagaugacugguggcugggggc

SEQ ID NO: 2445 - RNA, 22 nt, Homo Sapiens
cuggcucccucucuucucuccc

SEQ ID NO: 2446 - RNA, 22 nt, Homo Sapiens
ugacuggaggaagggagguaag

SEQ ID NO: 2447 - RNA, 22 nt, Homo Sapiens
ucuuugaucucuuccggggcuu

SEQ ID NO: 2448 - RNA, 22 nt, Homo Sapiens
uggagcagaaaggcaggagucc

SEQ ID NO: 2449 - RNA, 22 nt, Homo Sapiens
uggauuaguaaagaagaaugaa

SEQ ID NO: 2450 - RNA, 22 nt, Homo Sapiens
uuaaugcuaaucgugauagggg

SEQ ID NO: 2451 - RNA, 22 nt, Homo Sapiens
ggccaggacucuugcagaacug

SEQ ID NO: 2452 - RNA, 22 nt, Homo Sapiens
ggaggaggaggcuggugcuggu

SEQ ID NO: 2453 - RNA, 22 nt, Homo Sapiens
ucacaguugagagaagguucug

SEQ ID NO: 2454 - RNA, 22 nt, Homo Sapiens
ucacauccucccacuucaagug

SEQ ID NO: 2455 - RNA, 22 nt, Homo Sapiens
gugucacagauggccggaagag

SEQ ID NO: 2456 - RNA, 22 nt, Homo Sapiens
gugaagguagguuucagguuug

SEQ ID NO: 2457 - RNA, 22 nt, Homo Sapiens
uagcaccuucugaaauaacgug

SEQ ID NO: 2458 - RNA, 22 nt, Homo Sapiens
ggcagcugugcagagugggggu

SEQ ID NO: 2459 - RNA, 22 nt, Homo Sapiens
uuaguguucaggcucaaaugaa

SEQ ID NO: 2460 - RNA, 22 nt, Homo Sapiens
ugagggcaggugugaaaaugcu

SEQ ID NO: 2461 - RNA, 22 nt, Homo Sapiens
cuggucccugugucagucuuaa

SEQ ID NO: 2462 - RNA, 22 nt, Homo Sapiens
gaggugaaggaacaaaugcuga

SEQ ID NO: 2463 - RNA, 22 nt, Homo Sapiens
gauuccuccucuuuaaaauggu

SEQ ID NO: 2464 - RNA, 22 nt, Homo Sapiens
cacaauauagcaaauagagggu

SEQ ID NO: 2465 - RNA, 22 nt, Homo Sapiens
aagagcugaguaauugggggca

SEQ ID NO: 2466 - RNA, 22 nt, Homo Sapiens
aagguagauaaaggcuucacgu

SEQ ID NO: 2467 - RNA, 22 nt, Homo Sapiens
agucagacguuuggcaacagca

SEQ ID NO: 2468 - RNA, 22 nt, Homo Sapiens
agugguuucagggacuucugua

SEQ ID NO: 2469 - RNA, 22 nt, Homo Sapiens
uugaucacagcuacuuuugucc

SEQ ID NO: 2470 - RNA, 22 nt, Homo Sapiens
uugucagaggcugguagggugu

SEQ ID NO: 2471 - RNA, 22 nt, Homo Sapiens
cagaaaguagaaagcagauucg

SEQ ID NO: 2472 - RNA, 22 nt, Homo Sapiens
ugagugacagagcaacacucug

SEQ ID NO: 2473 - RNA, 22 nt, Homo Sapiens
ugaguguaugugugagagagaa

SEQ ID NO: 2474 - RNA, 22 nt, Homo Sapiens
ucugucauuuuucucuuuccau

SEQ ID NO: 2475 - RNA, 22 nt, Homo Sapiens
uggcucaguuugcucagcagug

SEQ ID NO: 2476 - RNA, 22 nt, Homo Sapiens
ugcuaggcuuauucucuuccuc

SEQ ID NO: 2477 - RNA, 22 nt, Homo Sapiens
ggaagaaugugcuuuuguuguu

SEQ ID NO: 2478 - RNA, 22 nt, Homo Sapiens
ggccucagaagcugaggggaga

SEQ ID NO: 2479 - RNA, 22 nt, Homo Sapiens
gggccaugacagggagauaggc

SEQ ID NO: 2480 - RNA, 22 nt, Homo Sapiens
uacagcucugcuucuggcucac

SEQ ID NO: 2481 - RNA, 22 nt, Homo Sapiens
ugaggacagaaaguuugugcug

SEQ ID NO: 2482 - RNA, 22 nt, Homo Sapiens
cuuggcccugugaggcuucacc

SEQ ID NO: 2483 - RNA, 22 nt, Homo Sapiens
cugggcgugugaggcggcugug

SEQ ID NO: 2484 - RNA, 22 nt, Homo Sapiens
acacaggcccagagaggcagug

SEQ ID NO: 2485 - RNA, 22 nt, Homo Sapiens
uugccuaggccggagugcagug

SEQ ID NO: 2486 - RNA, 22 nt, Homo Sapiens
accuggccuguaggcaagucuu

SEQ ID NO: 2487 - RNA, 22 nt, Homo Sapiens
gaggagguggggcagcagcagg

SEQ ID NO: 2488 - RNA, 22 nt, Homo Sapiens
ugccuaggcaggacggaaugca

SEQ ID NO: 2489 - RNA, 22 nt, Homo Sapiens
uacaggcaggcacagaggcagu

SEQ ID NO: 2490 - RNA, 22 nt, Homo Sapiens
gcaggcugguuggugaggcaaa

SEQ ID NO: 2491 - RNA, 22 nt, Homo Sapiens
gcagcaggcagggccaggcagg

SEQ ID NO: 2492 - RNA, 22 nt, Homo Sapiens
ugucaguuuuuuaaauacucag

SEQ ID NO: 2493 - RNA, 22 nt, Homo Sapiens
auauuggugaaaugcuagcaaa

SEQ ID NO: 2494 - RNA, 22 nt, Homo Sapiens
agucagacguuuggcaacagca

SEQ ID NO: 2495 - RNA, 22 nt, Homo Sapiens
aguccaguguucucugcucugu

SEQ ID NO: 2496 - RNA, 22 nt, Homo Sapiens
aggcagaaaacaauuccaagca

SEQ ID NO: 2497 - RNA, 22 nt, Homo Sapiens
acugcacucuagccuaggugau

SEQ ID NO: 2498 - RNA, 22 nt, Homo Sapiens
aauuuaacagacagccacagcc

SEQ ID NO: 2499 - RNA, 22 nt, Homo Sapiens
gaggugaaggaacaaaugcuga

SEQ ID NO: 2500 - RNA, 22 nt, Homo Sapiens
cuggcucccucucuucucuccc

SEQ ID NO: 2501 - RNA, 22 nt, Homo Sapiens
cucugccucccgggucuaggcu

SEQ ID NO: 2502 - RNA, 22 nt, Homo Sapiens
cacugcaacccccgccucccag

SEQ ID NO: 2503 - RNA, 22 nt, Homo Sapiens
ccugcccauccugccuccacca

SEQ ID NO: 2504 - RNA, 22 nt, Homo Sapiens
uguaaacaucccacacacucag

SEQ ID NO: 2505 - RNA, 22 nt, Homo Sapiens
uuacaaaauuuggagggauugu

SEQ ID NO: 2506 - RNA, 22 nt, Homo Sapiens
uucaguucuugaccugccccag

SEQ ID NO: 2507 - RNA, 22 nt, Homo Sapiens
ucugccucccugucucacucuc

SEQ ID NO: 2508 - RNA, 22 nt, Homo Sapiens
ucugagcccaggaguuugaggc

SEQ ID NO: 2509 - RNA, 22 nt, Homo Sapiens
uccaguacaggucucucauuuc

SEQ ID NO: 2510 - RNA, 22 nt, Homo Sapiens
uccccaagccuuguaccagcgu

SEQ ID NO: 2511 - RNA, 22 nt, Homo Sapiens
gggaggauccuugcucaacuua

SEQ ID NO: 2512 - RNA, 22 nt, Homo Sapiens
ggccaggacucuugcagaacug

SEQ ID NO: 2513 - RNA, 22 nt, Homo Sapiens
uacaggcaggcacagaggcagu

SEQ ID NO: 2514 - RNA, 22 nt, Homo Sapiens
ggugacagagacucugccucga

SEQ ID NO: 2515 - RNA, 22 nt, Homo Sapiens
uucucccugcccacacauccag

SEQ ID NO: 2516 - RNA, 22 nt, Homo Sapiens
uugcucaggcuggagugcagug

SEQ ID NO: 2517 - RNA, 22 nt, Homo Sapiens
uugcccaggcuggagugcagug

SEQ ID NO: 2518 - RNA, 22 nt, Homo Sapiens
uugcccaggcuagagugcagug

SEQ ID NO: 2519 - RNA, 22 nt, Homo Sapiens
gugugggcagggccgugcuccc

SEQ ID NO: 2520 - RNA, 22 nt, Homo Sapiens
uacaggcaggcacagaggcagu

SEQ ID NO: 2521 - RNA, 22 nt, Homo Sapiens
uagacugaggcuuccugcaggg

SEQ ID NO: 2522 - RNA, 22 nt, Homo Sapiens
gggccaugacagggagauaggc

SEQ ID NO: 2523 - RNA, 22 nt, Homo Sapiens
gcagcaggcagggccaggcagg

SEQ ID NO: 2524 - RNA, 22 nt, Homo Sapiens
gcacacaccuccuugcaguggc

SEQ ID NO: 2525 - RNA, 22 nt, Homo Sapiens
gcugcuccugcucucccucucc

SEQ ID NO: 2526 - RNA, 22 nt, Homo Sapiens
ucccuuugaagccagguuccag

SEQ ID NO: 2527 - RNA, 22 nt, Homo Sapiens
uccucaucuuugagucccagcg

SEQ ID NO: 2528 - RNA, 22 nt, Homo Sapiens
ucagucguuucucucucccagc

SEQ ID NO: 2529 - RNA, 22 nt, Homo Sapiens
ucuuccauuccccuccuacgcc

SEQ ID NO: 2530 - RNA, 22 nt, Homo Sapiens
ucuuccccaccuucggcuugca

SEQ ID NO: 2531 - RNA, 22 nt, Homo Sapiens
ugauccucuggcuucagccucc

SEQ ID NO: 2532 - RNA, 22 nt, Homo Sapiens
ugaucacaggcaaaggaauaaa

SEQ ID NO: 2533 - RNA, 22 nt, Homo Sapiens
ugaggcaggaguuggcaagagg

SEQ ID NO: 2534 - RNA, 22 nt, Homo Sapiens
uuaccauguuggccaggcuggu

SEQ ID NO: 2535 - RNA, 22 nt, Homo Sapiens
uggagcagaaaggcaggagucc

SEQ ID NO: 2536 - RNA, 22 nt, Homo Sapiens
uggagagauagugauuuagcuc

SEQ ID NO: 2537 - RNA, 22 nt, Homo Sapiens
uggagugucuggaggugucucu

SEQ ID NO: 2538 - RNA, 22 nt, Homo Sapiens
ugguggggagaggcuugggaag

SEQ ID NO: 2539 - RNA, 22 nt, Homo Sapiens
ccugcccauccugccuccacca

SEQ ID NO: 2540 - RNA, 22 nt, Homo Sapiens
cccaggcuggagugcaguggug

SEQ ID NO: 2541 - RNA, 22 nt, Homo Sapiens
cgcuauguuggccaggcugguc

SEQ ID NO: 2542 - RNA, 22 nt, Homo Sapiens
ccagccugagguuccuggaggg

SEQ ID NO: 2543 - RNA, 22 nt, Homo Sapiens
ccaaagugcuaggauuacagcc

SEQ ID NO: 2544 - RNA, 22 nt, Homo Sapiens
ccaaagugcugggauuacaggc

SEQ ID NO: 2545 - RNA, 22 nt, Homo Sapiens
ccaaagugcuaggaauacaggu

SEQ ID NO: 2546 - RNA, 22 nt, Homo Sapiens
ccaaagugcuggcguuacaggu

SEQ ID NO: 2547 - RNA, 22 nt, Homo Sapiens
caaagugcugagauuacaggca

SEQ ID NO: 2548 - RNA, 22 nt, Homo Sapiens
cacccaggcuggagugcagugg

SEQ ID NO: 2549 - RNA, 22 nt, Homo Sapiens
cacugggauuacagaugugagc

SEQ ID NO: 2550 - RNA, 22 nt, Homo Sapiens
cucugccucccgggucuaggcu

SEQ ID NO: 2551 - RNA, 22 nt, Homo Sapiens
cugaggcaggagggcucaggag

SEQ ID NO: 2552 - RNA, 22 nt, Homo Sapiens
cugggauuacaggugugaacca

SEQ ID NO: 2553 - RNA, 22 nt, Homo Sapiens
cugugccugugacgagggauga

SEQ ID NO: 2554 - RNA, 22 nt, Homo Sapiens
gauuccuccucuuuaaaauggu

SEQ ID NO: 2555 - RNA, 22 nt, Homo Sapiens
gagauggaguuuuacuauguug

SEQ ID NO: 2556 - RNA, 22 nt, Homo Sapiens
gaccccuugcccguggcuccca

SEQ ID NO: 2557 - RNA, 22 nt, Homo Sapiens
gaaccuucaacugcuuagccug

SEQ ID NO: 2558 - RNA, 22 nt, Homo Sapiens
aagugcugggauuacaggccug

SEQ ID NO: 2559 - RNA, 22 nt, Homo Sapiens
acaguguuacccaggcuggucu

SEQ ID NO: 2560 - RNA, 22 nt, Homo Sapiens
agacuggccucaagcucccaga

SEQ ID NO: 2561 - RNA, 22 nt, Homo Sapiens
aaugcugugccagagcugcacc

SEQ ID NO: 2562 - RNA, 22 nt, Homo Sapiens
gacaagaggcacagacagcagg

SEQ ID NO: 2563 - RNA, 22 nt, Homo Sapiens
cuggcucccucucuucucuccc

SEQ ID NO: 2564 - RNA, 22 nt, Homo Sapiens
uucaggcaccaggcacuuugcc

SEQ ID NO: 2565 - RNA, 22 nt, Homo Sapiens
ucugguuugagagacaaugaca

SEQ ID NO: 2566 - RNA, 22 nt, Homo Sapiens
ggcaugauucagcagaggagag

SEQ ID NO: 2567 - RNA, 22 nt, Homo Sapiens
gguccagacuggaguauagugc

SEQ ID NO: 2568 - RNA, 22 nt, Homo Sapiens
ucaaagcugcagauugccugug

SEQ ID NO: 2569 - RNA, 22 nt, Homo Sapiens
gguccacaaggggagagcaggg

SEQ ID NO: 2570 - RNA, 22 nt, Homo Sapiens
ggcugggcaugguggcucacgc

SEQ ID NO: 2571 - RNA, 22 nt, Homo Sapiens
ugagagaggaaggccguaggga

SEQ ID NO: 2572 - RNA, 22 nt, Homo Sapiens
uguccuuuguuuugagauggag

SEQ ID NO: 2573 - RNA, 22 nt, Homo Sapiens
ugguggggagaggcuugggaag

SEQ ID NO: 2574 - RNA, 22 nt, Homo Sapiens
uggguuagugguugaauaguuu

SEQ ID NO: 2575 - RNA, 22 nt, Homo Sapiens
uggagagauaagccaaguaucc

SEQ ID NO: 2576 - RNA, 22 nt, Homo Sapiens
uggagagagcagguugcuaaga

SEQ ID NO: 2577 - RNA, 22 nt, Homo Sapiens
uggaaugaggaagggugugguc

SEQ ID NO: 2578 - RNA, 22 nt, Homo Sapiens
cugggcucuggucuguagguuu

SEQ ID NO: 2579 - RNA, 22 nt, Homo Sapiens
gacaagaggcacagacagcagg

SEQ ID NO: 2580 - RNA, 22 nt, Homo Sapiens
gagguagagguugcagugaguc

SEQ ID NO: 2581 - RNA, 22 nt, Homo Sapiens
ccuuguguuuuccagauucuga

SEQ ID NO: 2582 - RNA, 22 nt, Homo Sapiens
acugcacuccauccuggggagc

SEQ ID NO: 2583 - RNA, 22 nt, Homo Sapiens
augggcaaauacugggagcugg

SEQ ID NO: 2584 - RNA, 22 nt, Homo Sapiens
aucugcugucuuuuagaagugg

SEQ ID NO: 2585 - RNA, 22 nt, Homo Sapiens
uucuacuagugguugauggccu

SEQ ID NO: 2586 - RNA, 22 nt, Homo Sapiens
uucugugcagguuaacauuucu

SEQ ID NO: 2587 - RNA, 22 nt, Homo Sapiens
uugcacuccagccugggugaca

SEQ ID NO: 2588 - RNA, 22 nt, Homo Sapiens
uugcacuccagucugggugaca

SEQ ID NO: 2589 - RNA, 22 nt, Homo Sapiens
auugcacuccagccugggugac

SEQ ID NO: 2590 - RNA, 22 nt, Homo Sapiens
auugcacuucagccugggugac

SEQ ID NO: 2591 - RNA, 22 nt, Homo Sapiens
acugcacuccugccugggugac

SEQ ID NO: 2592 - RNA, 22 nt, Homo Sapiens
ccccagucaaugcuucucucca

SEQ ID NO: 2593 - RNA, 22 nt, Homo Sapiens
cauugcacuccagccuggguga

SEQ ID NO: 2594 - RNA, 22 nt, Homo Sapiens
cagcaguguugcgaaucaucac

SEQ ID NO: 2595 - RNA, 22 nt, Homo Sapiens
cuggguggccuucaguccauga

SEQ ID NO: 2596 - RNA, 22 nt, Homo Sapiens
uggagcagaaaggcaggagucc

SEQ ID NO: 2597 - RNA, 22 nt, Homo Sapiens
ugcagccuugaacucuuucugg

SEQ ID NO: 2598 - RNA, 22 nt, Homo Sapiens
ucugccucccugucucacucuc

SEQ ID NO: 2599 - RNA, 22 nt, Homo Sapiens
uccaguacaggucucucauuuc

SEQ ID NO: 2600 - RNA, 22 nt, Homo Sapiens
uccagugaaacaggucucuuug

SEQ ID NO: 2601 - RNA, 22 nt, Homo Sapiens
guucugcugagauacgugcucu

SEQ ID NO: 2602 - RNA, 22 nt, Homo Sapiens
ggugaugcauuuaaaagggcag

SEQ ID NO: 2603 - RNA, 22 nt, Homo Sapiens
ggcaugauggagaggguggaga

SEQ ID NO: 2604 - RNA, 22 nt, Homo Sapiens
ucugcugugauggacacuugua

SEQ ID NO: 2605 - RNA, 21 nt, Homo Sapiens
ucugcugugauggacacuugu

SEQ ID NO: 2606 - RNA, 22 nt, Homo Sapiens
ucugucauuuuucucuuuccau

SEQ ID NO: 2607 - RNA, 22 nt, Homo Sapiens
uggagccuuguuguuuguucac

SEQ ID NO: 2608 - RNA, 22 nt, Homo Sapiens
uggagaccugugugguuugugg

SEQ ID NO: 2609 - RNA, 22 nt, Homo Sapiens
uguguuugaacaccuuggucac

SEQ ID NO: 2610 - RNA, 22 nt, Homo Sapiens
uuaaugcuuuuugucauacuca

SEQ ID NO: 2611 - RNA, 22 nt, Homo Sapiens
cugugcccagccagggcugugu

SEQ ID NO: 2612 - RNA, 22 nt, Homo Sapiens
gagguagagguugcagugaguc

SEQ ID NO: 2613 - RNA, 22 nt, Homo Sapiens
gaccagccauccugguuuacau

SEQ ID NO: 2614 - RNA, 22 nt, Homo Sapiens
cuauuggauuuuaagcauuggg

SEQ ID NO: 2615 - RNA, 22 nt, Homo Sapiens
aucuagagaggcagucuggcca

SEQ ID NO: 2616 - RNA, 22 nt, Homo Sapiens
auggauauuuuugaugcccaga

SEQ ID NO: 2617 - RNA, 22 nt, Homo Sapiens
agugcuuugauuaugagaaagu

SEQ ID NO: 2618 - RNA, 22 nt, Homo Sapiens
uucuuuuuccgcuuucugagcc

SEQ ID NO: 2619 - RNA, 22 nt, Homo Sapiens
uucccucauucuccacccaguc

SEQ ID NO: 2620 - RNA, 22 nt, Homo Sapiens
uuuggcuguuugucuugggcaa

SEQ ID NO: 2621 - RNA, 22 nt, Homo Sapiens
uugcaauagugaaaaaacugaa

SEQ ID NO: 2622 - RNA, 22 nt, Homo Sapiens
uuugaugcaugugaccugggau

SEQ ID NO: 2623 - RNA, 22 nt, Homo Sapiens
auggccuuuucucuuauccugg

SEQ ID NO: 2624 - RNA, 22 nt, Homo Sapiens
agauaguucucuguuguugggg

SEQ ID NO: 2625 - RNA, 22 nt, Homo Sapiens
aaguggcuuuugucuggcagau

SEQ ID NO: 2626 - RNA, 22 nt, Homo Sapiens
acagcucacuacagccuggauu

SEQ ID NO: 2627 - RNA, 22 nt, Homo Sapiens
cagguacuuuuugguuuacaug

SEQ ID NO: 2628 - RNA, 22 nt, Homo Sapiens
cagagaauggcacagcuguccu

SEQ ID NO: 2629 - RNA, 22 nt, Homo Sapiens
auuuuucugcauuuguauugga

SEQ ID NO: 2630 - RNA, 22 nt, Homo Sapiens
gaacagcuccagucuacagccc

SEQ ID NO: 2631 - RNA, 22 nt, Homo Sapiens
cucuuuaguaggaacucuggau

SEQ ID NO: 2632 - RNA, 22 nt, Homo Sapiens
uuagggcaggcaugagagaacu

SEQ ID NO: 2633 - RNA, 22 nt, Homo Sapiens
uggagugucuggaggugucucu

SEQ ID NO: 2634 - RNA, 22 nt, Homo Sapiens
ggcaugauggagaggguggaga

SEQ ID NO: 2635 - RNA, 22 nt, Homo Sapiens
gcagcuguuuauuuagaaccug

SEQ ID NO: 2636 - RNA, 22 nt, Homo Sapiens
gugcuuccauuuccccaucugu

SEQ ID NO: 2637 - RNA, 22 nt, Homo Sapiens
uacgcugugcugugacauggua

SEQ ID NO: 2638 - RNA, 22 nt, Homo Sapiens
gcagcaggcagggccaggcagg

SEQ ID NO: 2639 - RNA, 22 nt, Homo Sapiens
gcugagaccacccuugccugcc

SEQ ID NO: 2640 - RNA, 22 nt, Homo Sapiens
ggcaugauucagcagaggagag

SEQ ID NO: 2641 - RNA, 22 nt, Homo Sapiens
ggcaugugugagcagcugcagg

SEQ ID NO: 2642 - RNA, 22 nt, Homo Sapiens
ggccccuuugugaggcacgcuu

SEQ ID NO: 2643 - RNA, 22 nt, Homo Sapiens
gguccacaaggggagagcaggg

SEQ ID NO: 2644 - RNA, 22 nt, Homo Sapiens
ggccugaggucagcaguagagg

SEQ ID NO: 2645 - RNA, 22 nt, Homo Sapiens
ugguccagaggaggaaugaggg

SEQ ID NO: 2646 - RNA, 22 nt, Homo Sapiens
uggcaaggugugggcuagagau

SEQ ID NO: 2647 - RNA, 22 nt, Homo Sapiens
uggcagauuugguugcuguugg

SEQ ID NO: 2648 - RNA, 22 nt, Homo Sapiens
uucaggcaccaggcacuuugcc

SEQ ID NO: 2649 - RNA, 22 nt, Homo Sapiens
uucaggacuguggacugggcug

SEQ ID NO: 2650 - RNA, 22 nt, Homo Sapiens
uucacauguugcucaguuuugc

SEQ ID NO: 2651 - RNA, 22 nt, Homo Sapiens
uguacaaggggcucagccagcc

SEQ ID NO: 2652 - RNA, 22 nt, Homo Sapiens
ucaggcugaggucaucugcauc

SEQ ID NO: 2653 - RNA, 22 nt, Homo Sapiens
ugaggucauguucugucagguu

SEQ ID NO: 2654 - RNA, 22 nt, Homo Sapiens
cucugccucccgggucuaggcu

SEQ ID NO: 2655 - RNA, 22 nt, Homo Sapiens
cucagugguucagacacuguuu

SEQ ID NO: 2656 - RNA, 22 nt, Homo Sapiens
cugaauagaacagaagagcagc

SEQ ID NO: 2657 - RNA, 22 nt, Homo Sapiens
cugaggucaggaguucgagacc

SEQ ID NO: 2658 - RNA, 22 nt, Homo Sapiens
cugugcauguugauauccuggc

SEQ ID NO: 2659 - RNA, 22 nt, Homo Sapiens
cuuggcccugugaggcuucacc

SEQ ID NO: 2660 - RNA, 22 nt, Homo Sapiens
gagaugacugguggcugggggc

SEQ ID NO: 2661 - RNA, 22 nt, Homo Sapiens
gaggcagcaacuggugaggcac

SEQ ID NO: 2662 - RNA, 22 nt, Homo Sapiens
cguguaaucccagcuacuuggg

SEQ ID NO: 2663 - RNA, 22 nt, Homo Sapiens
ccuggcuuaggaagcucacaag

SEQ ID NO: 2664 - RNA, 22 nt, Homo Sapiens
cgacucuugaccauggcugggg

SEQ ID NO: 2665 - RNA, 22 nt, Homo Sapiens
ccccagucaaugcuucucucca

SEQ ID NO: 2666 - RNA, 22 nt, Homo Sapiens
ccagccugagguuccuggaggg

SEQ ID NO: 2667 - RNA, 22 nt, Homo Sapiens
aaggaagugucucuuggcuggc

SEQ ID NO: 2668 - RNA, 22 nt, Homo Sapiens
acaguccucuacuccagcuccc

SEQ ID NO: 2669 - RNA, 22 nt, Homo Sapiens
agagcuaggaagauacaggguu

SEQ ID NO: 2670 - RNA, 22 nt, Homo Sapiens
aggcaguaagggagaguuuugc

SEQ ID NO: 2671 - RNA, 22 nt, Homo Sapiens
aggccagagaggacucucuuuu

SEQ ID NO: 2672 - RNA, 22 nt, Homo Sapiens
agguagggaggguagaugcucu

SEQ ID NO: 2673 - RNA, 22 nt, Homo Sapiens
agugcagguucacaggcugggc

SEQ ID NO: 2674 - RNA, 22 nt, Homo Sapiens
auaagcacagggagguucuguc

SEQ ID NO: 2675 - RNA, 22 nt, Homo Sapiens
aggugggguuucaccauguugg

SEQ ID NO: 2676 - RNA, 22 nt, Homo Sapiens
uugguuggugaugagcauugaa

SEQ ID NO: 2677 - RNA, 22 nt, Homo Sapiens
cagcuauucaggagcuugaggu

SEQ ID NO: 2678 - RNA, 22 nt, Homo Sapiens
uucaccaaccacuccaccagcu

SEQ ID NO: 2679 - RNA, 21 nt, Homo Sapiens
uucacccaucuuuccacccac

SEQ ID NO: 2680 - RNA, 22 nt, Homo Sapiens
uucacccaucuuuccacccacg

SEQ ID NO: 2681 - RNA, 22 nt, Homo Sapiens
uguuaacauuuuggcuagauag

SEQ ID NO: 2682 - RNA, 22 nt, Homo Sapiens
uggggcacuguggaggugucau

SEQ ID NO: 2683 - RNA, 22 nt, Homo Sapiens
ggcagcugugcagagugggggu

SEQ ID NO: 2684 - RNA, 22 nt, Homo Sapiens
ucaaagcugcagauugccugug

SEQ ID NO: 2685 - RNA, 22 nt, Homo Sapiens
uaugaauguaaggaauguggga

SEQ ID NO: 2686 - RNA, 22 nt, Homo Sapiens
acagcaagucuuugucaaagcu

SEQ ID NO: 2687 - RNA, 22 nt, Homo Sapiens
aagugcuuugcuggaguccugu

SEQ ID NO: 2688 - RNA, 20 nt, Homo Sapiens
agcuccuucuuucugcaaca

SEQ ID NO: 2689 - RNA, 23 nt, Homo Sapiens
agugcuuugcuggaguccuguuc

SEQ ID NO: 2690 - RNA, 18 nt, Homo Sapiens
ccuguucucugagcucca

SEQ ID NO: 2691 - RNA, 21 nt, Homo Sapiens
cuccuccagcuccuucuuucu

SEQ ID NO: 2692 - RNA, 19 nt, Homo Sapiens
gcugaaaagugcuuugcug

SEQ ID NO: 2693 - RNA, 24 nt, Homo Sapiens
ggagaggggagagggacgcacagc

SEQ ID NO: 2694 - RNA, 17 nt, Homo Sapiens
ggagagggacgcacagc

SEQ ID NO: 2695 - RNA, 24 nt, Homo Sapiens
ggagagggacgcacagcacugccu

SEQ ID NO: 2696 - RNA, 26 nt, Homo Sapiens
gcccugaccucaggggccagggcacu

SEQ ID NO: 2697 - RNA, 25 nt, Homo Sapiens
gggagagggacgcacagcacugccu

SEQ ID NO: 2698 - RNA, 23 nt, Homo Sapiens
gggggagcugucugcggagccag

SEQ ID NO: 2699 - RNA, 27 nt, Homo Sapiens
gggggccuaaagcgacagucucagggg

SEQ ID NO: 2700 - RNA, 21 nt, Homo Sapiens
cucucaaggcccugaccucag

SEQ ID NO: 2701 - RNA, 28 nt, Homo Sapiens
cuccagggugccuccaccugcacaaccg

SEQ ID NO: 2702 - RNA, 28 nt, Homo Sapiens
ccuccagggugccuccaccugcacaacc

SEQ ID NO: 2703 - RNA, 27 nt, Homo Sapiens
ccucucaaggcccugaccucaggggcc

SEQ ID NO: 2704 - RNA, 27 nt, Homo Sapiens
cugggcccuguccagggcagugagucc

SEQ ID NO: 2705 - RNA, 20 nt, Homo Sapiens
cuuccagccaccugccucaa

SEQ ID NO: 2706 - RNA, 23 nt, Homo Sapiens
gaccucucaaggcccugaccuca

SEQ ID NO: 2707 - RNA, 18 nt, Homo Sapiens
gaugccauaaaagccgcc

SEQ ID NO: 2708 - RNA, 27 nt, Homo Sapiens
auccucucccccacaagagccccaaag

SEQ ID NO: 2709 - RNA, 22 nt, Homo Sapiens
auccuuccagccaccugccuca

SEQ ID NO: 2710 - RNA, 24 nt, Homo Sapiens
agggggagcugucugcggagccag

SEQ ID NO: 2711 - RNA, 26 nt, Homo Sapiens
auucguagccaucuccguggccaaug

SEQ ID NO: 2712 - RNA, 22 nt, Homo Sapiens
caauccuuccagccaccugccu

SEQ ID NO: 2713 - RNA, 23 nt, Homo Sapiens
caccauguucccagcucagugcc

SEQ ID NO: 2714 - RNA, 25 nt, Homo Sapiens
cagggcacugacaggacaggagagc

SEQ ID NO: 2715 - RNA, 26 nt, Homo Sapiens
ccagggcacugacaggacaggagagc

SEQ ID NO: 2716 - RNA, 24 nt, Homo Sapiens
cccagccucugagucccguggggc

SEQ ID NO: 2717 - RNA, 26 nt, Homo Sapiens
cccucgggccgggcaccacccccagu

SEQ ID NO: 2718 - RNA, 24 nt, Homo Sapiens
agagccccaaagaucccacgggag

SEQ ID NO: 2719 - RNA, 27 nt, Homo Sapiens
ucccuccagagacucgaguccccauga

SEQ ID NO: 2720 - RNA, 20 nt, Homo Sapiens
ugaggguggucagccaaggc

SEQ ID NO: 2721 - RNA, 23 nt, Homo Sapiens
ugggacccacagucacacagagc

SEQ ID NO: 2722 - RNA, 24 nt, Homo Sapiens
uguccagggcagugaguccucuac

SEQ ID NO: 2723 - RNA, 21 nt, Homo Sapiens
ugucaugucucugguggugcu

SEQ ID NO: 2724 - RNA, 20 nt, Homo Sapiens
ugggagccggaggcugcagu

SEQ ID NO: 2725 - RNA, 22 nt, Homo Sapiens
ugggagccggaggcugcaguga

SEQ ID NO: 2726 - RNA, 25 nt, Homo Sapiens
ugggccauuccaguacuuccugcag

SEQ ID NO: 2727 - RNA, 24 nt, Homo Sapiens
ugggaacacuggugggcagcugag

SEQ ID NO: 2728 - RNA, 23 nt, Homo Sapiens
uggagcucagcaacaaggcugca

SEQ ID NO: 2729 - RNA, 21 nt, Homo Sapiens
ugcugcugggccucugccuug

SEQ ID NO: 2730 - RNA, 19 nt, Homo Sapiens
ugcuucaguccacuucugc

SEQ ID NO: 2731 - RNA, 26 nt, Homo Sapiens
ugagccaagaucgcaccauugcacuc

SEQ ID NO: 2732 - RNA, 31 nt, Homo Sapiens
ugcaggcugcagucccuggaaaaacagucac

SEQ ID NO: 2733 - RNA, 22 nt, Homo Sapiens
ugcagugagccaagaucgcacc

SEQ ID NO: 2734 - RNA, 22 nt, Homo Sapiens
ucugacauuuauccaagaccug

SEQ ID NO: 2735 - RNA, 20 nt, Homo Sapiens
ucuucaugaccuacuucaaa

SEQ ID NO: 2736 - RNA, 20 nt, Homo Sapiens
ugagaaagagaaugagaaga

SEQ ID NO: 2737 - RNA, 25 nt, Homo Sapiens
uccaucaucuuccgcgcaggugcca

SEQ ID NO: 2738 - RNA, 25 nt, Homo Sapiens
ucauggccaccuccagggacaaaga

SEQ ID NO: 2739 - RNA, 23 nt, Homo Sapiens
uccuggagaacacguuggcucag

SEQ ID NO: 2740 - RNA, 21 nt, Homo Sapiens
uacugaccuggcuggugacag

SEQ ID NO: 2741 - RNA, 27 nt, Homo Sapiens
uucaaaccccuacugaccuggcuggug

SEQ ID NO: 2742 - RNA, 24 nt, Homo Sapiens
uucaccuccuuggcgcugccaccu

SEQ ID NO: 2743 - RNA, 24 nt, Homo Sapiens
uucugcagguacuuccucagucug

SEQ ID NO: 2744 - RNA, 26 nt, Homo Sapiens
uuggaagaggcugagacauucuucac

SEQ ID NO: 2745 - RNA, 21 nt, Homo Sapiens
uuguccugaugcugugcucaa

SEQ ID NO: 2746 - RNA, 22 nt, Homo Sapiens
agaggcugcugcagacaagugg

SEQ ID NO: 2747 - RNA, 27 nt, Homo Sapiens
agccuccuugucuauccuuccuccccc

SEQ ID NO: 2748 - RNA, 22 nt, Homo Sapiens
acacaccccacaccccagccca

SEQ ID NO: 2749 - RNA, 24 nt, Homo Sapiens
acacuggugggcagcugaggacac

SEQ ID NO: 2750 - RNA, 31 nt, Homo Sapiens
acauaggccugcucagccucuagcaccagga

SEQ ID NO: 2751 - RNA, 27 nt, Homo Sapiens
accagccuguccaacagaggggcagcc

SEQ ID NO: 2752 - RNA, 27 nt, Homo Sapiens
accauuguaaaguuuaugucaccagaa

SEQ ID NO: 2753 - RNA, 22 nt, Homo Sapiens
acugacucaagacacugagaua

SEQ ID NO: 2754 - RNA, 23 nt, Homo Sapiens
ccaucaucuuccgcgcaggugcc

SEQ ID NO: 2755 - RNA, 21 nt, Homo Sapiens
ccauugcacuccagcugggag

SEQ ID NO: 2756 - RNA, 27 nt, Homo Sapiens
ccauugcacuccagcugggagacacag

SEQ ID NO: 2757 - RNA, 18 nt, Homo Sapiens
cccacaagcaccugcuca

SEQ ID NO: 2758 - RNA, 21 nt, Homo Sapiens
cccagcccacccugcuccucc

SEQ ID NO: 2759 - RNA, 21 nt, Homo Sapiens
cauugcacuccagcugggaga

SEQ ID NO: 2760 - RNA, 24 nt, Homo Sapiens
cauugcacuccagcugggagacac

SEQ ID NO: 2761 - RNA, 27 nt, Homo Sapiens
cauugcacuccagcugggagacacagc

SEQ ID NO: 2762 - RNA, 22 nt, Homo Sapiens
ccaagaucgcaccauugcacuc

SEQ ID NO: 2763 - RNA, 27 nt, Homo Sapiens
cacuaggcacuguggcucugcaugaca

SEQ ID NO: 2764 - RNA, 21 nt, Homo Sapiens
caaucaggagugguggaaccu

SEQ ID NO: 2765 - RNA, 21 nt, Homo Sapiens
caccauugcacuccagcuggg

SEQ ID NO: 2766 - RNA, 21 nt, Homo Sapiens
auuccugagucugaagcugga

SEQ ID NO: 2767 - RNA, 20 nt, Homo Sapiens
aggccucugacauuuaucca

SEQ ID NO: 2768 - RNA, 22 nt, Homo Sapiens
aggcugaggcaggagaaucacu

SEQ ID NO: 2769 - RNA, 24 nt, Homo Sapiens
aggcuggccagacuucagcuguuc

SEQ ID NO: 2770 - RNA, 23 nt, Homo Sapiens
augaggucaauuuccugaugcau

SEQ ID NO: 2771 - RNA, 22 nt, Homo Sapiens
aucagccuggccaucuggauuu

SEQ ID NO: 2772 - RNA, 27 nt, Homo Sapiens
aucagccuggccaucuggauuuucaca

SEQ ID NO: 2773 - RNA, 27 nt, Homo Sapiens
gaugcucuaaagcugggcucaagcaag

SEQ ID NO: 2774 - RNA, 21 nt, Homo Sapiens
gcacaaaagggacuuggaaaa

SEQ ID NO: 2775 - RNA, 25 nt, Homo Sapiens
gcacacggcugccugacacugagcc

SEQ ID NO: 2776 - RNA, 22 nt, Homo Sapiens
gaccagccuguccaacagaggg

SEQ ID NO: 2777 - RNA, 24 nt, Homo Sapiens
gaaucacuggaaccugggagccgg

SEQ ID NO: 2778 - RNA, 22 nt, Homo Sapiens
cuuguccugaugcugugcucaa

SEQ ID NO: 2779 - RNA, 23 nt, Homo Sapiens
cugggagccggaggcugcaguga

SEQ ID NO: 2780 - RNA, 26 nt, Homo Sapiens
cugggagccggaggcugcagugagcc

SEQ ID NO: 2781 - RNA, 22 nt, Homo Sapiens
cugggcuuugucaugucucugg

SEQ ID NO: 2782 - RNA, 21 nt, Homo Sapiens
cugagccuccuugucuauccu

SEQ ID NO: 2783 - RNA, 21 nt, Homo Sapiens
ccgccagaucugcaccaccuu

SEQ ID NO: 2784 - RNA, 21 nt, Homo Sapiens
ccuacuucaaaccccuacuga

SEQ ID NO: 2785 - RNA, 27 nt, Homo Sapiens
cuccaucuuccacgaaaugggccauuc

SEQ ID NO: 2786 - RNA, 27 nt, Homo Sapiens
cuccuugucuauccuuccucccccacc

SEQ ID NO: 2787 - RNA, 26 nt, Homo Sapiens
cucuccaucuuccacgaaaugggcca

SEQ ID NO: 2788 - RNA, 25 nt, Homo Sapiens
cucugcucuccugcggccaugggcc

SEQ ID NO: 2789 - RNA, 22 nt, Homo Sapiens
cugaggcaggagaaucacugga

SEQ ID NO: 2790 - RNA, 19 nt, Homo Sapiens
gggagccggaggcugcagu

SEQ ID NO: 2791 - RNA, 22 nt, Homo Sapiens
gggagccggaggcugcagugag

SEQ ID NO: 2792 - RNA, 23 nt, Homo Sapiens
ggcuggccagacuucagcuguuc

SEQ ID NO: 2793 - RNA, 21 nt, Homo Sapiens
ggaugugaauggcaugcugaa

SEQ ID NO: 2794 - RNA, 23 nt, Homo Sapiens
ggcaggagaaucacuggaaccug

SEQ ID NO: 2795 - RNA, 22 nt, Homo Sapiens
ggcugcugcagacaaguggaca

SEQ ID NO: 2796 - RNA, 27 nt, Homo Sapiens
gggggcccaucccugcccaccuccugg

SEQ ID NO: 2797 - RNA, 21 nt, Homo Sapiens
gucaugucucugguggugcug

SEQ ID NO: 2798 - RNA, 27 nt, Homo Sapiens
gcccugucccugucccccuccccuccc

SEQ ID NO: 2799 - RNA, 22 nt, Homo Sapiens
gcccccacuaggcacuguggcu

SEQ ID NO: 2800 - RNA, 21 nt, Homo Sapiens
gcagugagccaagaucgcacc

SEQ ID NO: 2801 - RNA, 22 nt, Homo Sapiens
ggagcucagcaacaaggcugca

SEQ ID NO: 2802 - RNA, 22 nt, Homo Sapiens
ggaggcugaggcaggagaauca

SEQ ID NO: 2803 - RNA, 27 nt, Homo Sapiens
ggaggcugcagugagccaagaucgcac

SEQ ID NO: 2804 - RNA, 21 nt, Homo Sapiens
gcucuccaucuuccacgaaau

SEQ ID NO: 2805 - RNA, 25 nt, Homo Sapiens
gcugagacauucuucaccuccuugg

SEQ ID NO: 2806 - RNA, 23 nt, Homo Sapiens
gcugaggcaggagaaucacugga

SEQ ID NO: 2807 - RNA, 23 nt, Homo Sapiens
gcugggagacacagcaagacucc

SEQ ID NO: 2808 - RNA, 23 nt, Homo Sapiens
gcuccuccccgcgugccuucgcc

SEQ ID NO: 2809 - RNA, 19 nt, Homo Sapiens
gccaguauucuuuuauaaa

SEQ ID NO: 2810 - RNA, 22 nt, Homo Sapiens
ggucgccugcauuucuccgugc

SEQ ID NO: 2811 - RNA, 23 nt, Homo Sapiens
ccgguccucuggcaugucuucag

SEQ ID NO: 2812 - RNA, 27 nt, Homo Sapiens
cuuuguuguuugaauggaaauggaaaa

SEQ ID NO: 2813 - RNA, 21 nt, Homo Sapiens
auccccaccccaccccgacgu

SEQ ID NO: 2814 - RNA, 19 nt, Homo Sapiens
agugcucccuuccuccuca

SEQ ID NO: 2815 - RNA, 31 nt, Homo Sapiens
auacuauuuauuucagggcugggcuauaaca

SEQ ID NO: 2816 - RNA, 23 nt, Homo Sapiens
cauccucccucucgucuuucgca

SEQ ID NO: 2817 - RNA, 23 nt, Homo Sapiens
caucggccgccuccagcucccgg

SEQ ID NO: 2818 - RNA, 18 nt, Homo Sapiens
ccaguauucuuuuauaaa

SEQ ID NO: 2819 - RNA, 26 nt, Homo Sapiens
ccccgccucugcccucauccucccuc

SEQ ID NO: 2820 - RNA, 25 nt, Homo Sapiens
accguggggaagggccccacucagg

SEQ ID NO: 2821 - RNA, 20 nt, Homo Sapiens
uagugcucccuuccuccuca

SEQ ID NO: 2822 - RNA, 22 nt, Homo Sapiens
uauuuauuucagggcugggcua

SEQ ID NO: 2823 - RNA, 24 nt, Homo Sapiens
ugaguggucggaccguggggaagg

SEQ ID NO: 2824 - RNA, 22 nt, Homo Sapiens
uauucuacucaaacuuaugucu

SEQ ID NO: 2825 - RNA, 22 nt, Homo Sapiens
uaguguuugcauuccugguuau

SEQ ID NO: 2826 - RNA, 25 nt, Homo Sapiens
uacugcacucugcuguuagaagcag

SEQ ID NO: 2827 - RNA, 23 nt, Homo Sapiens
uaccuaggagcuguggauguaau

SEQ ID NO: 2828 - RNA, 21 nt, Homo Sapiens
uaaaucacaggaagaagcggc

SEQ ID NO: 2829 - RNA, 23 nt, Homo Sapiens
uccagagagcagggaacuaccuu

SEQ ID NO: 2830 - RNA, 28 nt, Homo Sapiens
uccagagagcagggaacuaccuugagua

SEQ ID NO: 2831 - RNA, 20 nt, Homo Sapiens
acucaaacuuaugucucaga

SEQ ID NO: 2832 - RNA, 22 nt, Homo Sapiens
aaggcugaguccacacugcaag

SEQ ID NO: 2833 - RNA, 19 nt, Homo Sapiens
ccacagcuugcuaguucug

SEQ ID NO: 2834 - RNA, 21 nt, Homo Sapiens
cagcccaguaggagucaugua

SEQ ID NO: 2835 - RNA, 25 nt, Homo Sapiens
auuuuucuaaacgcuuacagauucc

SEQ ID NO: 2836 - RNA, 26 nt, Homo Sapiens
cuucauaaucaaauauaugacauaua

SEQ ID NO: 2837 - RNA, 23 nt, Homo Sapiens
gaaggcugaguccacacugcaag

SEQ ID NO: 2838 - RNA, 21 nt, Homo Sapiens
ccugguuauauguaaugugau

SEQ ID NO: 2839 - RNA, 21 nt, Homo Sapiens
ggugcuggugacuuucuguuc

SEQ ID NO: 2840 - RNA, 32 nt, Homo Sapiens
gccaaagcauggguuucaacacguuuuguauu

SEQ ID NO: 2841 - RNA, 22 nt, Homo Sapiens
gcauuuucuucacuugcaggca

SEQ ID NO: 2842 - RNA, 24 nt, Homo Sapiens
ggaggcggaggucugaguuucgag

SEQ ID NO: 2843 - RNA, 23 nt, Homo Sapiens
ggcuaggaggcucgaccaccuca

SEQ ID NO: 2844 - RNA, 20 nt, Homo Sapiens
gggcggcggcaggccuagca

SEQ ID NO: 2845 - RNA, 19 nt, Homo Sapiens
ccggaucgaugugcugcug

SEQ ID NO: 2846 - RNA, 21 nt, Homo Sapiens
cggccccugaaguggagcgag

SEQ ID NO: 2847 - RNA, 21 nt, Homo Sapiens
gagagggaggugcuucgccgu

SEQ ID NO: 2848 - RNA, 22 nt, Homo Sapiens
augggaaaacuucacuccaaag

SEQ ID NO: 2849 - RNA, 21 nt, Homo Sapiens
caugagacgcuacugcagcuu

SEQ ID NO: 2850 - RNA, 21 nt, Homo Sapiens
aacgagggggagggagguccc

SEQ ID NO: 2851 - RNA, 28 nt, Homo Sapiens
agcuuuugccuugguucuuccuagugcc

SEQ ID NO: 2852 - RNA, 23 nt, Homo Sapiens
ucaggauaacagagaaugguggu

SEQ ID NO: 2853 - RNA, 20 nt, Homo Sapiens
uccggaucgaugugcugcug

SEQ ID NO: 2854 - RNA, 24 nt, Homo Sapiens
guugccggccccugaaguggagcg

SEQ ID NO: 2855 - RNA, 27 nt, Homo Sapiens
uauuucuuacguacacuguacuucugu

SEQ ID NO: 2856 - RNA, 23 nt, Homo Sapiens
ugccuugguucuuccuagugccu

SEQ ID NO: 2857 - RNA, 22 nt, Homo Sapiens
ugaacagauauuuuuaacuuaa

SEQ ID NO: 2858 - RNA, 19 nt, Homo Sapiens
ucuuccuagugccuacaau

SEQ ID NO: 2859 - RNA, 26 nt, Homo Sapiens
ucuuuuauauugauaacagcacugac

SEQ ID NO: 2860 - RNA, 21 nt, Homo Sapiens
ugcgccacuacacuccagccu

SEQ ID NO: 2861 - RNA, 22 nt, Homo Sapiens
ugccuguaaucccagcacuugg

SEQ ID NO: 2862 - RNA, 27 nt, Homo Sapiens
ugccuguaaucccagcacuuggagagg

SEQ ID NO: 2863 - RNA, 22 nt, Homo Sapiens
uggcucaugccuguaaucccag

SEQ ID NO: 2864 - RNA, 20 nt, Homo Sapiens
uauuuaguucucagcucuuc

SEQ ID NO: 2865 - RNA, 24 nt, Homo Sapiens
guuuuuaaaauaucuuuugaccug

SEQ ID NO: 2866 - RNA, 21 nt, Homo Sapiens
uccagccugggugacagagug

SEQ ID NO: 2867 - RNA, 24 nt, Homo Sapiens
uuugaggcuuucagguuuuaguuu

SEQ ID NO: 2868 - RNA, 22 nt, Homo Sapiens
uugcgccacuacacuccagccu

SEQ ID NO: 2869 - RNA, 23 nt, Homo Sapiens
uuccugcgccccagacuccaggc

SEQ ID NO: 2870 - RNA, 23 nt, Homo Sapiens
agccuggcgguagaaucuuccca

SEQ ID NO: 2871 - RNA, 20 nt, Homo Sapiens
agcacagacucacauaugga

SEQ ID NO: 2872 - RNA, 26 nt, Homo Sapiens
acuuccugcagguaaacaguucuugu

SEQ ID NO: 2873 - RNA, 22 nt, Homo Sapiens
acuccagccugggugacagagu

SEQ ID NO: 2874 - RNA, 18 nt, Homo Sapiens
accauccggucaccagaa

SEQ ID NO: 2875 - RNA, 22 nt, Homo Sapiens
caugccuguaaucccagcacuu

SEQ ID NO: 2876 - RNA, 22 nt, Homo Sapiens
ccacuacacuccagccugggug

SEQ ID NO: 2877 - RNA, 19 nt, Homo Sapiens
ccagaagugaaaaggcugc

SEQ ID NO: 2878 - RNA, 21 nt, Homo Sapiens
ccagagaauggacaccaucca

SEQ ID NO: 2879 - RNA, 23 nt, Homo Sapiens
ccagagagguggagucgguagcg

SEQ ID NO: 2880 - RNA, 28 nt, Homo Sapiens
ccagagagguggagucgguagcggggcc

SEQ ID NO: 2881 - RNA, 22 nt, Homo Sapiens
cagcacuuggagaggcugaggu

SEQ ID NO: 2882 - RNA, 17 nt, Homo Sapiens
caggccgccugcagccu

SEQ ID NO: 2883 - RNA, 21 nt, Homo Sapiens
ccagccugggugacagaguga

SEQ ID NO: 2884 - RNA, 21 nt, Homo Sapiens
cccagcacuuggagaggcuga

SEQ ID NO: 2885 - RNA, 26 nt, Homo Sapiens
auguagcagggaaaauauauaucuaa

SEQ ID NO: 2886 - RNA, 22 nt, Homo Sapiens
cacuacacuccagccuggguga

SEQ ID NO: 2887 - RNA, 26 nt, Homo Sapiens
auagauuugaccuacaaaucaaucac

SEQ ID NO: 2888 - RNA, 28 nt, Homo Sapiens
agguugcgccacuacacuccagccuggg

SEQ ID NO: 2889 - RNA, 24 nt, Homo Sapiens
agugacuuagcagaugcuggucau

SEQ ID NO: 2890 - RNA, 19 nt, Homo Sapiens
gaccauccggucaccagaa

SEQ ID NO: 2891 - RNA, 22 nt, Homo Sapiens
gagguugcgccacuacacucca

SEQ ID NO: 2892 - RNA, 22 nt, Homo Sapiens
cuucaacuaaaaacaaaggaga

SEQ ID NO: 2893 - RNA, 22 nt, Homo Sapiens
cgccacuacacuccagccuggg

SEQ ID NO: 2894 - RNA, 23 nt, Homo Sapiens
cuacaaaucaaucacagcuugua

SEQ ID NO: 2895 - RNA, 18 nt, Homo Sapiens
cugacuuaagugugcaaa

SEQ ID NO: 2896 - RNA, 20 nt, Homo Sapiens
ccuguaaucccagcacuugg

SEQ ID NO: 2897 - RNA, 23 nt, Homo Sapiens
gggcccugauuugcugggcaguu

SEQ ID NO: 2898 - RNA, 15 nt, Homo Sapiens
ggcaguuuuucugua

SEQ ID NO: 2899 - RNA, 22 nt, Homo Sapiens
gcucaugccuguaaucccagca

SEQ ID NO: 2900 - RNA, 21 nt, Homo Sapiens
gccuguaaucccagcacuugg

SEQ ID NO: 2901 - RNA, 27 nt, Homo Sapiens
gccuauuguuaaagauuugcaugugaa

SEQ ID NO: 2902 - RNA, 21 nt, Homo Sapiens
gugaacaaagggaaaauucua

SEQ ID NO: 2903 - RNA, 22 nt, Homo Sapiens
gugcaaagagaauuaggagaga

SEQ ID NO: 2904 - RNA, 24 nt, Homo Sapiens
gugaugauuuucagaaaguuguug

SEQ ID NO: 2905 - RNA, 23 nt, Homo Sapiens
ccugguucuauuaaaauauccau

SEQ ID NO: 2906 - RNA, 21 nt, Homo Sapiens
ccuugcaauauagaaaaacuu

SEQ ID NO: 2907 - RNA, 23 nt, Homo Sapiens
cugcuucucuuacuauacucaua

SEQ ID NO: 2908 - RNA, 22 nt, Homo Sapiens
gagcaauuaaaccacuauucca

SEQ ID NO: 2909 - RNA, 26 nt, Homo Sapiens
gcacacaccuaaagauaucuuuuuag

SEQ ID NO: 2910 - RNA, 27 nt, Homo Sapiens
gaaaugaggccuguacaaggcugauaa

SEQ ID NO: 2911 - RNA, 26 nt, Homo Sapiens
aguuugaauaguuagacauggaaauu

SEQ ID NO: 2912 - RNA, 21 nt, Homo Sapiens
aucucaguguaucuagucacu

SEQ ID NO: 2913 - RNA, 27 nt, Homo Sapiens
augggcagaaucugcucucugugacca

SEQ ID NO: 2914 - RNA, 26 nt, Homo Sapiens
caaauuaaugcauaauuucagaugua

SEQ ID NO: 2915 - RNA, 24 nt, Homo Sapiens
cccaacaacauuaaaaaauacucg

SEQ ID NO: 2916 - RNA, 21 nt, Homo Sapiens
ccagugccauuugucugugca

SEQ ID NO: 2917 - RNA, 21 nt, Homo Sapiens
cagcaaguuuucuaucauguc

SEQ ID NO: 2918 - RNA, 20 nt, Homo Sapiens
acuauauuacaucauuucag

SEQ ID NO: 2919 - RNA, 22 nt, Homo Sapiens
acugaucacuauauuacaucau

SEQ ID NO: 2920 - RNA, 17 nt, Homo Sapiens
acugucucccccuuguc

SEQ ID NO: 2921 - RNA, 20 nt, Homo Sapiens
acugucucccccuugucacc

SEQ ID NO: 2922 - RNA, 23 nt, Homo Sapiens
aauucagagaaauggaguguuca

SEQ ID NO: 2923 - RNA, 22 nt, Homo Sapiens
acaaaauuuauuuuuauuuuuu

SEQ ID NO: 2924 - RNA, 22 nt, Homo Sapiens
acuuaaaaccuuugacugccug

SEQ ID NO: 2925 - RNA, 23 nt, Homo Sapiens
aaccuauaugugauggagaucac

SEQ ID NO: 2926 - RNA, 18 nt, Homo Sapiens
aacacugaugaauguaaa

SEQ ID NO: 2927 - RNA, 26 nt, Homo Sapiens
aagacuguuuccacaccauaggcaau

SEQ ID NO: 2928 - RNA, 25 nt, Homo Sapiens
aaaaagugguuaauauuaauaagac

SEQ ID NO: 2929 - RNA, 23 nt, Homo Sapiens
aaaaauucauaguaauccugcca

SEQ ID NO: 2930 - RNA, 19 nt, Homo Sapiens
aaaccuuugacugccugua

SEQ ID NO: 2931 - RNA, 27 nt, Homo Sapiens
uucaguauuuucuuaagaaauugcuuu

SEQ ID NO: 2932 - RNA, 22 nt, Homo Sapiens
uuuccauuguugcaucuugaau

SEQ ID NO: 2933 - RNA, 21 nt, Homo Sapiens
ucuccaccuuuuucuuaugag

SEQ ID NO: 2934 - RNA, 27 nt, Homo Sapiens
ucuccaccuuuuucuuaugagucucac

SEQ ID NO: 2935 - RNA, 20 nt, Homo Sapiens
uacucugcuucucuuacuau

SEQ ID NO: 2936 - RNA, 19 nt, Homo Sapiens
uaacuggaggauucagcac

SEQ ID NO: 2937 - RNA, 27 nt, Homo Sapiens
uauauuuucacaacuacuuucucucuc

SEQ ID NO: 2938 - RNA, 32 nt, Homo Sapiens
uauauuuucacaacuacuuucucucuccagag

SEQ ID NO: 2939 - RNA, 26 nt, Homo Sapiens
uaguaauccugccaaaugugccuauu

SEQ ID NO: 2940 - RNA, 21 nt, Homo Sapiens
ucugcagcuauuucaacuucc

SEQ ID NO: 2941 - RNA, 25 nt, Homo Sapiens
uggaaggaagcaggauggcagccgg

SEQ ID NO: 2942 - RNA, 25 nt, Homo Sapiens
ucuccuguauaaccccaccuugcca

SEQ ID NO: 2943 - RNA, 26 nt, Homo Sapiens
caccuugccaagcuuucuucuacaac

SEQ ID NO: 2944 - RNA, 26 nt, Homo Sapiens
cucuccuguauaaccccaccuugcca

SEQ ID NO: 2945 - RNA, 21 nt, Homo Sapiens
ggcaggcgagaguaguacugg

SEQ ID NO: 2946 - RNA, 20 nt, Homo Sapiens
gcaggcgagaguaguacugg

SEQ ID NO: 2947 - RNA, 25 nt, Homo Sapiens
ggcuuaaagcauccuccuccuggac

SEQ ID NO: 2948 - RNA, 28 nt, Homo Sapiens
gugccuaaaacccaguugcugaucccug

SEQ ID NO: 2949 - RNA, 23 nt, Homo Sapiens
guggccaggcaggcgggggcugc

SEQ ID NO: 2950 - RNA, 22 nt, Homo Sapiens
cucuccucuucgugguuguguu

SEQ ID NO: 2951 - RNA, 18 nt, Homo Sapiens
cucuucgugguuguguuu

SEQ ID NO: 2952 - RNA, 23 nt, Homo Sapiens
ccugcucccaccaccagugagac

SEQ ID NO: 2953 - RNA, 19 nt, Homo Sapiens
gauccccuggaaacccacc

SEQ ID NO: 2954 - RNA, 22 nt, Homo Sapiens
cugcccucucugcgcugaggcc

SEQ ID NO: 2955 - RNA, 22 nt, Homo Sapiens
cagacuucuuaaaaggagcucg

SEQ ID NO: 2956 - RNA, 21 nt, Homo Sapiens
auccugagagaccugcccucu

SEQ ID NO: 2957 - RNA, 21 nt, Homo Sapiens
ccaaccuuaaaccucuucuau

SEQ ID NO: 2958 - RNA, 27 nt, Homo Sapiens
ccaggauaaaaggggaaauaacugccu

SEQ ID NO: 2959 - RNA, 23 nt, Homo Sapiens
cccuccagcaccacuuuggcuua

SEQ ID NO: 2960 - RNA, 27 nt, Homo Sapiens
agccaaccuuaaaccucuucuauugcu

SEQ ID NO: 2961 - RNA, 19 nt, Homo Sapiens
aggauggagagcagccagc

SEQ ID NO: 2962 - RNA, 21 nt, Homo Sapiens
aggcagcagcggcuggagcgg

SEQ ID NO: 2963 - RNA, 24 nt, Homo Sapiens
acucccuugaggauggagagcagc

SEQ ID NO: 2964 - RNA, 21 nt, Homo Sapiens
ugcuugagggagaauccuccc

SEQ ID NO: 2965 - RNA, 25 nt, Homo Sapiens
uggcgcuggaggcagcagcggcugg

SEQ ID NO: 2966 - RNA, 22 nt, Homo Sapiens
ugagccaaccuuaaaccucuuc

SEQ ID NO: 2967 - RNA, 22 nt, Homo Sapiens
ugacuaaugaccacaccugccu

SEQ ID NO: 2968 - RNA, 25 nt, Homo Sapiens
ugucuucucccugcacaagccaggg

SEQ ID NO: 2969 - RNA, 24 nt, Homo Sapiens
ucuaggguuuuccaaugugacuaa

SEQ ID NO: 2970 - RNA, 20 nt, Homo Sapiens
guuuguaaagcguuccaagu

SEQ ID NO: 2971 - RNA, 21 nt, Homo Sapiens
uucuugugucuggagauucug

SEQ ID NO: 2972 - RNA, 22 nt, Homo Sapiens
acucauuuuaguggcugccucc

SEQ ID NO: 2973 - RNA, 23 nt, Homo Sapiens
acuguccuguggacagacggggu

SEQ ID NO: 2974 - RNA, 22 nt, Homo Sapiens
cagcccagccacggacgcuggc

SEQ ID NO: 2975 - RNA, 17 nt, Homo Sapiens
caaaggagagucacaga

SEQ ID NO: 2976 - RNA, 20 nt, Homo Sapiens
caacaugaaaacuccauauu

SEQ ID NO: 2977 - RNA, 22 nt, Homo Sapiens
augauggccacaacaugaaaac

SEQ ID NO: 2978 - RNA, 17 nt, Homo Sapiens
cugccucucccgucguc

SEQ ID NO: 2979 - RNA, 26 nt, Homo Sapiens
cugucuucucccugcacaagccaggg

SEQ ID NO: 2980 - RNA, 17 nt, Homo Sapiens
ggguuuuccaaugugac

SEQ ID NO: 2981 - RNA, 27 nt, Homo Sapiens
ggcccccacaauggucccaaacagcug

SEQ ID NO: 2982 - RNA, 18 nt, Homo Sapiens
gccagccgugagugcaga

SEQ ID NO: 2983 - RNA, 22 nt, Homo Sapiens
gcugccucugccacugacugca

SEQ ID NO: 2984 - RNA, 27 nt, Homo Sapiens
ggagugguaacaagaggagcaggaagc

SEQ ID NO: 2985 - RNA, 23 nt, Homo Sapiens
gccaggccucauccuccuggacc

SEQ ID NO: 2986 - RNA, 20 nt, Homo Sapiens
ggccccagggaacuaaaggg

SEQ ID NO: 2987 - RNA, 22 nt, Homo Sapiens
ggcuauuccuaggccucaggcc

SEQ ID NO: 2988 - RNA, 21 nt, Homo Sapiens
gggucccuucccccugcucca

SEQ ID NO: 2989 - RNA, 26 nt, Homo Sapiens
gggugugggucagggaggggucuaga

SEQ ID NO: 2990 - RNA, 21 nt, Homo Sapiens
cuacgguucccugccuaggag

SEQ ID NO: 2991 - RNA, 24 nt, Homo Sapiens
aucuaaucccuucaaggaagugau

SEQ ID NO: 2992 - RNA, 23 nt, Homo Sapiens
aggcuauuccuaggccucaggcc

SEQ ID NO: 2993 - RNA, 19 nt, Homo Sapiens
cagggaggggucuagaggc

SEQ ID NO: 2994 - RNA, 27 nt, Homo Sapiens
cccugcuccaugggcaccucugcugua

SEQ ID NO: 2995 - RNA, 27 nt, Homo Sapiens
cccuucccccugcuccaugggcaccuc

SEQ ID NO: 2996 - RNA, 27 nt, Homo Sapiens
cccagcuccccggaugaaacagauaua

SEQ ID NO: 2997 - RNA, 26 nt, Homo Sapiens
ccaguuuaaaagaguuugaaggagca

SEQ ID NO: 2998 - RNA, 21 nt, Homo Sapiens
cccaccccuccuagugaacua

SEQ ID NO: 2999 - RNA, 23 nt, Homo Sapiens
ccaacuggcagcuuucccugaca

SEQ ID NO: 3000 - RNA, 21 nt, Homo Sapiens
ccaaaacagcauuuuccugcu

SEQ ID NO: 3001 - RNA, 27 nt, Homo Sapiens
aucucccaccccagagaacgaggauuu

SEQ ID NO: 3002 - RNA, 20 nt, Homo Sapiens
aguucuguaacgccaucucc

SEQ ID NO: 3003 - RNA, 31 nt, Homo Sapiens
augcagaucuggaaaccucagccagagaacu

SEQ ID NO: 3004 - RNA, 23 nt, Homo Sapiens
auguucucucgucuugccaccau

SEQ ID NO: 3005 - RNA, 21 nt, Homo Sapiens
caacaaauuacauuagguuga

SEQ ID NO: 3006 - RNA, 22 nt, Homo Sapiens
cagaccccaguccagcccugaa

SEQ ID NO: 3007 - RNA, 23 nt, Homo Sapiens
cacaucccaacaggaacgacuca

SEQ ID NO: 3008 - RNA, 22 nt, Homo Sapiens
agaauuauaguucacuauggcc

SEQ ID NO: 3009 - RNA, 19 nt, Homo Sapiens
agcauuuuccugcuccuuc

SEQ ID NO: 3010 - RNA, 27 nt, Homo Sapiens
agcauuuuccugcuccuucguauguag

SEQ ID NO: 3011 - RNA, 19 nt, Homo Sapiens
agccccacugcagucauca

SEQ ID NO: 3012 - RNA, 20 nt, Homo Sapiens
agccuuucauccuuaguuug

SEQ ID NO: 3013 - RNA, 19 nt, Homo Sapiens
acacauggacaccauuuca

SEQ ID NO: 3014 - RNA, 20 nt, Homo Sapiens
acagcauuuuccugcuccuu

SEQ ID NO: 3015 - RNA, 21 nt, Homo Sapiens
aaagcugaggcugacaauaau

SEQ ID NO: 3016 - RNA, 25 nt, Homo Sapiens
aaagagccccacccacaggauuccu

SEQ ID NO: 3017 - RNA, 19 nt, Homo Sapiens
aauacuccucaucagccuu

SEQ ID NO: 3018 - RNA, 23 nt, Homo Sapiens
cuacagcuguuugugggauguug

SEQ ID NO: 3019 - RNA, 20 nt, Homo Sapiens
cguccuuggaaugaaugaug

SEQ ID NO: 3020 - RNA, 22 nt, Homo Sapiens
cucugccaacaucaagcuggug

SEQ ID NO: 3021 - RNA, 25 nt, Homo Sapiens
ccucccaaaugcaggaaaaaauaug

SEQ ID NO: 3022 - RNA, 25 nt, Homo Sapiens
ccucagccagagaacuagagcagaa

SEQ ID NO: 3023 - RNA, 21 nt, Homo Sapiens
ccuggcaccgagcgaugagga

SEQ ID NO: 3024 - RNA, 23 nt, Homo Sapiens
cuguaaaaauaggauggcgaguu

SEQ ID NO: 3025 - RNA, 21 nt, Homo Sapiens
gaaacuucaaaauugaugaaa

SEQ ID NO: 3026 - RNA, 27 nt, Homo Sapiens
gcacagccccugcugggaaauggcucu

SEQ ID NO: 3027 - RNA, 22 nt, Homo Sapiens
gaucuccaggguucuaggaaag

SEQ ID NO: 3028 - RNA, 26 nt, Homo Sapiens
gaaguuagaggguaaagagccccacc

SEQ ID NO: 3029 - RNA, 26 nt, Homo Sapiens
guaccaaagaccugggaaaacuaacc

SEQ ID NO: 3030 - RNA, 23 nt, Homo Sapiens
guaguaucaacagugacccagaa

SEQ ID NO: 3031 - RNA, 20 nt, Homo Sapiens
gucuucuuggcuggaccugu

SEQ ID NO: 3032 - RNA, 25 nt, Homo Sapiens
gcccagccacaccaccaaacacccu

SEQ ID NO: 3033 - RNA, 23 nt, Homo Sapiens
gcauuuugggugggacauauuuc

SEQ ID NO: 3034 - RNA, 21 nt, Homo Sapiens
gcuagagguaaacguucugcu

SEQ ID NO: 3035 - RNA, 21 nt, Homo Sapiens
ggaauucugcauccagcucua

SEQ ID NO: 3036 - RNA, 21 nt, Homo Sapiens
gcucuaucccccucugaugcu

SEQ ID NO: 3037 - RNA, 27 nt, Homo Sapiens
ugugauuuuugcuaguccaugugcuag

SEQ ID NO: 3038 - RNA, 21 nt, Homo Sapiens
uguggucggaucugcccagcc

SEQ ID NO: 3039 - RNA, 19 nt, Homo Sapiens
uguuguccaggcagcucau

SEQ ID NO: 3040 - RNA, 23 nt, Homo Sapiens
uuuuccauuuuacuuugaagauu

SEQ ID NO: 3041 - RNA, 24 nt, Homo Sapiens
guugaaccuuuccuugauuuuaug

SEQ ID NO: 3042 - RNA, 26 nt, Homo Sapiens
guucugcuggaauucugcauccagcu

SEQ ID NO: 3043 - RNA, 22 nt, Homo Sapiens
uagucuuguuuacuucuucuua

SEQ ID NO: 3044 - RNA, 27 nt, Homo Sapiens
uccucaucagccuuucauccuuaguuu

SEQ ID NO: 3045 - RNA, 26 nt, Homo Sapiens
uccagcuggacaacguugucccaaga

SEQ ID NO: 3046 - RNA, 27 nt, Homo Sapiens
ucccaaaacagcauuuuccugcuccuu

SEQ ID NO: 3047 - RNA, 24 nt, Homo Sapiens
ucccagcccaggagaacuaagagc

SEQ ID NO: 3048 - RNA, 22 nt, Homo Sapiens
ucauccagcccagaaaccaaga

SEQ ID NO: 3049 - RNA, 24 nt, Homo Sapiens
ugucuucuuggcuggaccugucac

SEQ ID NO: 3050 - RNA, 22 nt, Homo Sapiens
uguaaaaauaggauggcgaguu

SEQ ID NO: 3051 - RNA, 24 nt, Homo Sapiens
ugggugggacauauuucaaacuuc

SEQ ID NO: 3052 - RNA, 23 nt, Homo Sapiens
ugcugaugcuuugucuucagaga

SEQ ID NO: 3053 - RNA, 26 nt, Homo Sapiens
ugacaccuuggcaguguuuauggcca

SEQ ID NO: 3054 - RNA, 26 nt, Homo Sapiens
ugcagcuagagaauuauaguucacua

SEQ ID NO: 3055 - RNA, 20 nt, Homo Sapiens
ucugcuacccucauccuggu

SEQ ID NO: 3056 - RNA, 26 nt, Homo Sapiens
uguugucugcuacccucauccugguc

SEQ ID NO: 3057 - RNA, 21 nt, Homo Sapiens
cuggucacugcuucugcuaua

SEQ ID NO: 3058 - RNA, 22 nt, Homo Sapiens
cuagggggacagccacuguguu

SEQ ID NO: 3059 - RNA, 30 nt, Homo Sapiens
acaucugcagucuuucuucuuugaauuucc

SEQ ID NO: 3060 - RNA, 21 nt, Homo Sapiens
cccucauccuggucacugcuu

SEQ ID NO: 3061 - RNA, 21 nt, Homo Sapiens
auucacccucucauguuuccc

SEQ ID NO: 3062 - RNA, 25 nt, Homo Sapiens
agggcagcagggagucuugaaguga

SEQ ID NO: 3063 - RNA, 21 nt, Homo Sapiens
acucccagccuagggcagcag

SEQ ID NO: 3064 - RNA, 22 nt, Homo Sapiens
cuagggcagcagggagucuuga

SEQ ID NO: 3065 - RNA, 20 nt, Homo Sapiens
ccuccccucuuccuggagcc

SEQ ID NO: 3066 - RNA, 24 nt, Homo Sapiens
ggaaauucuuauuuccccuuucca

SEQ ID NO: 3067 - RNA, 23 nt, Homo Sapiens
gccgggccgggcgggagugcagg

SEQ ID NO: 3068 - RNA, 22 nt, Homo Sapiens
ggccgggcgggagugcagggga

SEQ ID NO: 3069 - RNA, 21 nt, Homo Sapiens
gggccgggcgggagugcaggg

SEQ ID NO: 3070 - RNA, 24 nt, Homo Sapiens
gggcagcagggagucuugaaguga

SEQ ID NO: 3071 - RNA, 21 nt, Homo Sapiens
uccccacguggcaccuccuca

SEQ ID NO: 3072 - RNA, 27 nt, Homo Sapiens
uccucaccuuaauuuauuuuuuaaguu

SEQ ID NO: 3073 - RNA, 25 nt, Homo Sapiens
ucaacucuucagccucauucacugu

SEQ ID NO: 3074 - RNA, 24 nt, Homo Sapiens
uacuacuguagaacugcaauuucc

SEQ ID NO: 3075 - RNA, 27 nt, Homo Sapiens
uacuacuguagaacugcaauuuccauu

SEQ ID NO: 3076 - RNA, 17 nt, Homo Sapiens
ucugacauccugaccuc

SEQ ID NO: 3077 - RNA, 26 nt, Homo Sapiens
ugaaacugagucuguggacacugugg

SEQ ID NO: 3078 - RNA, 19 nt, Homo Sapiens
ugcucacugcuucugcuuu

SEQ ID NO: 3079 - RNA, 26 nt, Homo Sapiens
ugcugagaaaugggguggaauaggga

SEQ ID NO: 3080 - RNA, 21 nt, Homo Sapiens
ugggguggaauagggaacugu

SEQ ID NO: 3081 - RNA, 21 nt, Homo Sapiens
uuguauugucugacacaugcu

SEQ ID NO: 3082 - RNA, 21 nt, Homo Sapiens
uugucugacacaugcucucaa

SEQ ID NO: 3083 - RNA, 17 nt, Homo Sapiens
gcucacugcuucugcuu

SEQ ID NO: 3084 - RNA, 18 nt, Homo Sapiens
gcucacugcuucugcuuu

SEQ ID NO: 3085 - RNA, 19 nt, Homo Sapiens
gcucacugcuucugcuuuu

SEQ ID NO: 3086 - RNA, 25 nt, Homo Sapiens
ccuccacccccuccugucaccggcc

SEQ ID NO: 3087 - RNA, 24 nt, Homo Sapiens
ccucuacuuuguccccucaccucc

SEQ ID NO: 3088 - RNA, 26 nt, Homo Sapiens
ccucauucacuguccuggcuuuuauu

SEQ ID NO: 3089 - RNA, 20 nt, Homo Sapiens
ccgcugcugcuuuccuucgg

SEQ ID NO: 3090 - RNA, 22 nt, Homo Sapiens
cgucuucuagagagcuuagugu

SEQ ID NO: 3091 - RNA, 24 nt, Homo Sapiens
cuccacccccuccugucaccggcc

SEQ ID NO: 3092 - RNA, 26 nt, Homo Sapiens
cuggauaccugugugucuccauaaaa

SEQ ID NO: 3093 - RNA, 22 nt, Homo Sapiens
gacuauauaaaguacuacugua

SEQ ID NO: 3094 - RNA, 22 nt, Homo Sapiens
gagucuguggacacuguggaaa

SEQ ID NO: 3095 - RNA, 25 nt, Homo Sapiens
gaggaguccgagugugugagcuuga

SEQ ID NO: 3096 - RNA, 27 nt, Homo Sapiens
acugagucuguggacacuguggaaagc

SEQ ID NO: 3097 - RNA, 22 nt, Homo Sapiens
auuguauugucugacacaugcu

SEQ ID NO: 3098 - RNA, 21 nt, Homo Sapiens
augcuuguacaguugaugucg

SEQ ID NO: 3099 - RNA, 26 nt, Homo Sapiens
ccagugcuuccacagagauuagccug

SEQ ID NO: 3100 - RNA, 27 nt, Homo Sapiens
cccuccagcaaggauucaggagugccc

SEQ ID NO: 3101 - RNA, 17 nt, Homo Sapiens
accaauaaaaauccuac

SEQ ID NO: 3102 - RNA, 23 nt, Homo Sapiens
agcgccugugcugaggacucccg

SEQ ID NO: 3103 - RNA, 26 nt, Homo Sapiens
gacucaugggaccugaagggugacau

SEQ ID NO: 3104 - RNA, 20 nt, Homo Sapiens
ccuccagcaaggauucagga

SEQ ID NO: 3105 - RNA, 22 nt, Homo Sapiens
ggugacauccaggaggggccuc

SEQ ID NO: 3106 - RNA, 27 nt, Homo Sapiens
gggcggguggggaggggugcucugcug

SEQ ID NO: 3107 - RNA, 15 nt, Homo Sapiens
ggcggaucccacucg

SEQ ID NO: 3108 - RNA, 21 nt, Homo Sapiens
cgugccuguuuuaugugcaca

SEQ ID NO: 3109 - RNA, 19 nt, Homo Sapiens
acggggcggguggggaggg

SEQ ID NO: 3110 - RNA, 22 nt, Homo Sapiens
cauguaaauaaauacauucuug

SEQ ID NO: 3111 - RNA, 20 nt, Homo Sapiens
augugggaagaaacaaaccc

SEQ ID NO: 3112 - RNA, 22 nt, Homo Sapiens
aguucagcugcuucucuugccu

SEQ ID NO: 3113 - RNA, 24 nt, Homo Sapiens
aucccuguucauuguaagcacuuu

SEQ ID NO: 3114 - RNA, 21 nt, Homo Sapiens
uuuccugaucacuaugcauuu

SEQ ID NO: 3115 - RNA, 22 nt, Homo Sapiens
uuggguggggagaagaggcaga

SEQ ID NO: 3116 - RNA, 21 nt, Homo Sapiens
uggguggggagaagaggcaga

SEQ ID NO: 3117 - RNA, 23 nt, Homo Sapiens
ugccugaacuugaauuaauccac

SEQ ID NO: 3118 - RNA, 22 nt, Homo Sapiens
uacuacauuauuaauggguuuu

SEQ ID NO: 3119 - RNA, 23 nt, Homo Sapiens
ucucuauacuacauuauuaaugg

SEQ ID NO: 3120 - RNA, 20 nt, Homo Sapiens
ucucuccugauuauuuauca

SEQ ID NO: 3121 - RNA, 23 nt, Homo Sapiens
ucccuguucauuguaagcacuuu

SEQ ID NO: 3122 - RNA, 22 nt, Homo Sapiens
uccgaguagcugggauuacagg

SEQ ID NO: 3123 - RNA, 24 nt, Homo Sapiens
guuaccucaauucuuacuguagua

SEQ ID NO: 3124 - RNA, 20 nt, Homo Sapiens
guguacuucaccucuuggcu

SEQ ID NO: 3125 - RNA, 23 nt, Homo Sapiens
guugcccaggcugggagggcaau

SEQ ID NO: 3126 - RNA, 24 nt, Homo Sapiens
guugcccaggcugggagggcaaug

SEQ ID NO: 3127 - RNA, 27 nt, Homo Sapiens
guugcccaggcugggagggcaauggca

SEQ ID NO: 3128 - RNA, 24 nt, Homo Sapiens
ucaaaucucugucucugcuugguu

SEQ ID NO: 3129 - RNA, 27 nt, Homo Sapiens
uauguagaagccuaggaucacagggug

SEQ ID NO: 3130 - RNA, 25 nt, Homo Sapiens
uagugcagacagaaaacugcaguga

SEQ ID NO: 3131 - RNA, 23 nt, Homo Sapiens
ugccaaaacaugauugaagccuu

SEQ ID NO: 3132 - RNA, 21 nt, Homo Sapiens
ugcccaggcugggagggcaau

SEQ ID NO: 3133 - RNA, 23 nt, Homo Sapiens
ugcccaggcugggagggcaaugg

SEQ ID NO: 3134 - RNA, 22 nt, Homo Sapiens
ugcaaccuccgccucccggguu

SEQ ID NO: 3135 - RNA, 24 nt, Homo Sapiens
ugacauuuggauuaaucuccagcu

SEQ ID NO: 3136 - RNA, 20 nt, Homo Sapiens
ugaauuauugaccuaauaaa

SEQ ID NO: 3137 - RNA, 25 nt, Homo Sapiens
ugaaacacugguccaguccauugaa

SEQ ID NO: 3138 - RNA, 22 nt, Homo Sapiens
ucuuccauguggagguauucaa

SEQ ID NO: 3139 - RNA, 21 nt, Homo Sapiens
ugggauuacaggcuccugcca

SEQ ID NO: 3140 - RNA, 19 nt, Homo Sapiens
uugcccaggcugggagggc

SEQ ID NO: 3141 - RNA, 23 nt, Homo Sapiens
uugcccaggcugggagggcaaug

SEQ ID NO: 3142 - RNA, 22 nt, Homo Sapiens
uuguugcccaggcugggagggc

SEQ ID NO: 3143 - RNA, 20 nt, Homo Sapiens
uuuaauauguaauucuucca

SEQ ID NO: 3144 - RNA, 24 nt, Homo Sapiens
uuugaacuucccaaccuuguuuga

SEQ ID NO: 3145 - RNA, 22 nt, Homo Sapiens
uuuuaaaaaauucauuuugcag

SEQ ID NO: 3146 - RNA, 22 nt, Homo Sapiens
uguuugaagcuguuauuugcag

SEQ ID NO: 3147 - RNA, 23 nt, Homo Sapiens
uguugcccaggcugggagggcaa

SEQ ID NO: 3148 - RNA, 24 nt, Homo Sapiens
uguugcccaggcugggagggcaau

SEQ ID NO: 3149 - RNA, 20 nt, Homo Sapiens
uuaggauaaguuagaugugu

SEQ ID NO: 3150 - RNA, 27 nt, Homo Sapiens
uguuuuuaaaaaauucauuuugcagaa

SEQ ID NO: 3151 - RNA, 23 nt, Homo Sapiens
uuaaaaaauucauuuugcagaaa

SEQ ID NO: 3152 - RNA, 20 nt, Homo Sapiens
uuaacacaaguacuaauaaa

SEQ ID NO: 3153 - RNA, 23 nt, Homo Sapiens
uuaagaauuugugacauguagca

SEQ ID NO: 3154 - RNA, 23 nt, Homo Sapiens
uuaccucaauucuuacuguagua

SEQ ID NO: 3155 - RNA, 26 nt, Homo Sapiens
uucaguuauauucagcauguaccgca

SEQ ID NO: 3156 - RNA, 22 nt, Homo Sapiens
uuccagcgauucuccugccuca

SEQ ID NO: 3157 - RNA, 23 nt, Homo Sapiens
uuccagcgauucuccugccucag

SEQ ID NO: 3158 - RNA, 21 nt, Homo Sapiens
aucaaauuuaagaauuuguga

SEQ ID NO: 3159 - RNA, 23 nt, Homo Sapiens
aucugauagaccagcacuucuga

SEQ ID NO: 3160 - RNA, 24 nt, Homo Sapiens
aguuugcccccggaggaggcaggg

SEQ ID NO: 3161 - RNA, 23 nt, Homo Sapiens
aguauagaaaaguuaacacaagu

SEQ ID NO: 3162 - RNA, 18 nt, Homo Sapiens
auuuuuuguaagccaguc

SEQ ID NO: 3163 - RNA, 22 nt, Homo Sapiens
cauugugauauauucuguacuu

SEQ ID NO: 3164 - RNA, 26 nt, Homo Sapiens
caucauuauuggcaguuucuccuuau

SEQ ID NO: 3165 - RNA, 21 nt, Homo Sapiens
ccgagcugcuggggaggaccu

SEQ ID NO: 3166 - RNA, 20 nt, Homo Sapiens
cccaggcugggagggcaaug

SEQ ID NO: 3167 - RNA, 19 nt, Homo Sapiens
ccaggcugggagggcaaug

SEQ ID NO: 3168 - RNA, 25 nt, Homo Sapiens
ccauugcauuuaaguucccuaggag

SEQ ID NO: 3169 - RNA, 22 nt, Homo Sapiens
accuuuguuccuagccuguugg

SEQ ID NO: 3170 - RNA, 22 nt, Homo Sapiens
acugcaaccuccgccucccggg

SEQ ID NO: 3171 - RNA, 27 nt, Homo Sapiens
accacgccuggcuaggaaauuuuuugu

SEQ ID NO: 3172 - RNA, 19 nt, Homo Sapiens
acacugguccaguccauug

SEQ ID NO: 3173 - RNA, 22 nt, Homo Sapiens
agccuuccgaguagcugggauu

SEQ ID NO: 3174 - RNA, 22 nt, Homo Sapiens
agaaaacauugccauuuugguu

SEQ ID NO: 3175 - RNA, 26 nt, Homo Sapiens
aaggaugauuuuaacaacuuuuuaau

SEQ ID NO: 3176 - RNA, 22 nt, Homo Sapiens
aagcaagucuauaaauaucggc

SEQ ID NO: 3177 - RNA, 23 nt, Homo Sapiens
aacuaaaacuuuucaguucuacu

SEQ ID NO: 3178 - RNA, 21 nt, Homo Sapiens
aaacaaaacacuaacaaucuu

SEQ ID NO: 3179 - RNA, 23 nt, Homo Sapiens
cuauuauuucugguucuaaugaa

SEQ ID NO: 3180 - RNA, 20 nt, Homo Sapiens
cucaaagcugacuuugccaa

SEQ ID NO: 3181 - RNA, 22 nt, Homo Sapiens
cgccgucccucaguuugccccc

SEQ ID NO: 3182 - RNA, 18 nt, Homo Sapiens
cggcugcagccauccccc

SEQ ID NO: 3183 - RNA, 21 nt, Homo Sapiens
cucauuucuguauauuccuuu

SEQ ID NO: 3184 - RNA, 27 nt, Homo Sapiens
cucauuucuguauauuccuuuuauggg

SEQ ID NO: 3185 - RNA, 22 nt, Homo Sapiens
ccgaguagcugggauuacaggc

SEQ ID NO: 3186 - RNA, 23 nt, Homo Sapiens
cgaguagcugggauuacaggcuc

SEQ ID NO: 3187 - RNA, 20 nt, Homo Sapiens
gacguacuugcaguuuauga

SEQ ID NO: 3188 - RNA, 26 nt, Homo Sapiens
gaccaguguugaucuguaauguaaua

SEQ ID NO: 3189 - RNA, 27 nt, Homo Sapiens
gaguagcugggauuacaggcuccugcc

SEQ ID NO: 3190 - RNA, 23 nt, Homo Sapiens
gauaaugcaaaaauuauguaaua

SEQ ID NO: 3191 - RNA, 22 nt, Homo Sapiens
gaugaagcaaacccacacccua

SEQ ID NO: 3192 - RNA, 18 nt, Homo Sapiens
gcacauguuuuucaagag

SEQ ID NO: 3193 - RNA, 24 nt, Homo Sapiens
cuggaccaguguugaucuguaaug

SEQ ID NO: 3194 - RNA, 26 nt, Homo Sapiens
cugggacggaacccggguuccucucg

SEQ ID NO: 3195 - RNA, 25 nt, Homo Sapiens
cuggguggcaaaguuacuacuggaa

SEQ ID NO: 3196 - RNA, 22 nt, Homo Sapiens
cugccccccaccccucaguuaa

SEQ ID NO: 3197 - RNA, 24 nt, Homo Sapiens
cugccaccacgccuggcuaggaaa

SEQ ID NO: 3198 - RNA, 22 nt, Homo Sapiens
cugcaaccuccgccucccgggu

SEQ ID NO: 3199 - RNA, 18 nt, Homo Sapiens
cugcagugaacacaugcc

SEQ ID NO: 3200 - RNA, 29 nt, Homo Sapiens
gaaacaaaaagguauuuugcuguuaccuc

SEQ ID NO: 3201 - RNA, 22 nt, Homo Sapiens
gaaacaucauuauuggcaguuu

SEQ ID NO: 3202 - RNA, 21 nt, Homo Sapiens
cuuuaaguagggauguuuagg

SEQ ID NO: 3203 - RNA, 21 nt, Homo Sapiens
ggcucacugcaaccuccgccu

SEQ ID NO: 3204 - RNA, 22 nt, Homo Sapiens
ggcucacugcaaccuccgccuc

SEQ ID NO: 3205 - RNA, 21 nt, Homo Sapiens
guacacagauggcagugccau

SEQ ID NO: 3206 - RNA, 28 nt, Homo Sapiens
ggguucaugacuuggcuguuaaagaugu

SEQ ID NO: 3207 - RNA, 23 nt, Homo Sapiens
gucucauccuucucugacucuuc

SEQ ID NO: 3208 - RNA, 20 nt, Homo Sapiens
gugcuauuauuucugguucu

SEQ ID NO: 3209 - RNA, 22 nt, Homo Sapiens
gcucacugcaaccuccgccucc

SEQ ID NO: 3210 - RNA, 20 nt, Homo Sapiens
gcucuuguugcccaggcugg

SEQ ID NO: 3211 - RNA, 19 nt, Homo Sapiens
gcugcagccaucccccuca

SEQ ID NO: 3212 - RNA, 25 nt, Homo Sapiens
gcugcuggggaggaccucaguuaac

SEQ ID NO: 3213 - RNA, 20 nt, Homo Sapiens
gcuuaagaaaacauugccau

SEQ ID NO: 3214 - RNA, 27 nt, Homo Sapiens
ggaggugggggccuucgggaggaggag

SEQ ID NO: 3215 - RNA, 23 nt, Homo Sapiens
gcccaggcugggagggcaauggc

SEQ ID NO: 3216 - RNA, 22 nt, Homo Sapiens
gccaaaacaugauugaagccuu

SEQ ID NO: 3217 - RNA, 20 nt, Homo Sapiens
gcagugccauaagcaagucu

SEQ ID NO: 3218 - RNA, 21 nt, Homo Sapiens
gcccuccucugcacucccacc

SEQ ID NO: 3219 - RNA, 24 nt, Homo Sapiens
ggcacucagucucucuucucucca

SEQ ID NO: 3220 - RNA, 21 nt, Homo Sapiens
ggcuguaacuacuuuauaacu

SEQ ID NO: 3221 - RNA, 21 nt, Homo Sapiens
gcacagcccuuaugcgguuaa

SEQ ID NO: 3222 - RNA, 23 nt, Homo Sapiens
ccgucuggcccaccaggguccuu

SEQ ID NO: 3223 - RNA, 22 nt, Homo Sapiens
cucaggcaauuagacacuuugg

SEQ ID NO: 3224 - RNA, 21 nt, Homo Sapiens
cucagucucucuucucuccag

SEQ ID NO: 3225 - RNA, 20 nt, Homo Sapiens
cuacccagacuagauguagu

SEQ ID NO: 3226 - RNA, 22 nt, Homo Sapiens
agcuguggcagaguuacaguuc

SEQ ID NO: 3227 - RNA, 22 nt, Homo Sapiens
ccagguucccucccagaggagc

SEQ ID NO: 3228 - RNA, 23 nt, Homo Sapiens
cagcugcaagguacucuggugag

SEQ ID NO: 3229 - RNA, 19 nt, Homo Sapiens
auuaucugucagcugcaag

SEQ ID NO: 3230 - RNA, 27 nt, Homo Sapiens
aguauuuuguauaauuggauucuaaua

SEQ ID NO: 3231 - RNA, 17 nt, Homo Sapiens
aggcuguaacuacuuua

SEQ ID NO: 3232 - RNA, 21 nt, Homo Sapiens
uucuccucacuguauccaggu

SEQ ID NO: 3233 - RNA, 19 nt, Homo Sapiens
uucggccccauguaucuca

SEQ ID NO: 3234 - RNA, 21 nt, Homo Sapiens
uuaccuaagauuacaaaucag

SEQ ID NO: 3235 - RNA, 22 nt, Homo Sapiens
uggugagucaccacuucagggc

SEQ ID NO: 3236 - RNA, 28 nt, Homo Sapiens
uggcucuaauucacagugcucuuucucc

SEQ ID NO: 3237 - RNA, 21 nt, Homo Sapiens
ucaggcaauuagacacuuugg

SEQ ID NO: 3238 - RNA, 24 nt, Homo Sapiens
ucucuggugcagccccuguccuca

SEQ ID NO: 3239 - RNA, 21 nt, Homo Sapiens
uggcggccgugggcuccuggg

SEQ ID NO: 3240 - RNA, 25 nt, Homo Sapiens
uggcggccgugggcuccuggggagc

SEQ ID NO: 3241 - RNA, 21 nt, Homo Sapiens
ugggggugcgggggugucaug

SEQ ID NO: 3242 - RNA, 21 nt, Homo Sapiens
uggggagccacuggggagggg

SEQ ID NO: 3243 - RNA, 21 nt, Homo Sapiens
uggggaggggguggcggccgc

SEQ ID NO: 3244 - RNA, 22 nt, Homo Sapiens
uuaucuuguugucacagggcua

SEQ ID NO: 3245 - RNA, 28 nt, Homo Sapiens
uuaucuuguugucacagggcuaacccuc

SEQ ID NO: 3246 - RNA, 23 nt, Homo Sapiens
uuggucccuuaucuuguugucac

SEQ ID NO: 3247 - RNA, 22 nt, Homo Sapiens
cagccagcagaggcagcagcac

SEQ ID NO: 3248 - RNA, 22 nt, Homo Sapiens
acccugugagaacaagccccuc

SEQ ID NO: 3249 - RNA, 22 nt, Homo Sapiens
cucagagauggucuccagguga

SEQ ID NO: 3250 - RNA, 27 nt, Homo Sapiens
cucucccugaauccagagcgcugcagu

SEQ ID NO: 3251 - RNA, 21 nt, Homo Sapiens
cccuguccucaccacucuggg

SEQ ID NO: 3252 - RNA, 19 nt, Homo Sapiens
ccucucauucugugucccu

SEQ ID NO: 3253 - RNA, 27 nt, Homo Sapiens
ccuguccucaccacucugggcuugugc

SEQ ID NO: 3254 - RNA, 32 nt, Homo Sapiens
ccuguccucaccacucugggcuugugcuguuc

SEQ ID NO: 3255 - RNA, 22 nt, Homo Sapiens
gcacagacaggcccacgugugu

SEQ ID NO: 3256 - RNA, 23 nt, Homo Sapiens
gaauccagagcgcugcagucaca

SEQ ID NO: 3257 - RNA, 21 nt, Homo Sapiens
cugggcuugugcuguucuugg

SEQ ID NO: 3258 - RNA, 23 nt, Homo Sapiens
gggguccaccugugugcaccagg

SEQ ID NO: 3259 - RNA, 23 nt, Homo Sapiens
ggggagccacuggggagggggug

SEQ ID NO: 3260 - RNA, 22 nt, Homo Sapiens
gccugaguccccaugcccugcu

SEQ ID NO: 3261 - RNA, 24 nt, Homo Sapiens
ggacaugaucuucuuuauaauucu

SEQ ID NO: 3262 - RNA, 24 nt, Homo Sapiens
ggcaacuuagagguggggagcaga

SEQ ID NO: 3263 - RNA, 22 nt, Homo Sapiens
cuuugagugcugucuccauguu

SEQ ID NO: 3264 - RNA, 23 nt, Homo Sapiens
gcaacuuagagguggggagcaga

SEQ ID NO: 3265 - RNA, 30 nt, Homo Sapiens
gauaugcuuauacacuuacacuuuaugcac

SEQ ID NO: 3266 - RNA, 22 nt, Homo Sapiens
cuccauguuugauguaucugag

SEQ ID NO: 3267 - RNA, 28 nt, Homo Sapiens
agguggggagcagagaauucucuuaucc

SEQ ID NO: 3268 - RNA, 21 nt, Homo Sapiens
caaauucugcuugcuugcuuu

SEQ ID NO: 3269 - RNA, 25 nt, Homo Sapiens
uggacaugaucuucuuuauaauucu

SEQ ID NO: 3270 - RNA, 23 nt, Homo Sapiens
uggaugaauuccaaauucugcuu

SEQ ID NO: 3271 - RNA, 26 nt, Homo Sapiens
ugauaugcuuauacacuuacacuuua

SEQ ID NO: 3272 - RNA, 24 nt, Homo Sapiens
ucucuuauccaacaucaacaucuu

SEQ ID NO: 3273 - RNA, 20 nt, Homo Sapiens
ucuaguuccugauagcuacc

SEQ ID NO: 3274 - RNA, 24 nt, Homo Sapiens
ucaguucuagcauaguaaacuacg

SEQ ID NO: 3275 - RNA, 24 nt, Homo Sapiens
ucaugacagcuacuaaccuggaga

SEQ ID NO: 3276 - RNA, 22 nt, Homo Sapiens
ucccuaucaguucuagcauagu

SEQ ID NO: 3277 - RNA, 22 nt, Homo Sapiens
uccagggcauaaaacucaaccc

SEQ ID NO: 3278 - RNA, 20 nt, Homo Sapiens
uaguaccuguaagcauuuua

SEQ ID NO: 3279 - RNA, 19 nt, Homo Sapiens
guuacuuccuuccugcccc

SEQ ID NO: 3280 - RNA, 23 nt, Homo Sapiens
guuagugggaagagcuggguuuu

SEQ ID NO: 3281 - RNA, 27 nt, Homo Sapiens
guuucacugccuuccuacccucucuaa

SEQ ID NO: 3282 - RNA, 22 nt, Homo Sapiens
uaacacaugaauuucugccaua

SEQ ID NO: 3283 - RNA, 27 nt, Homo Sapiens
ucuuccuggucauaggcucacucuuuc

SEQ ID NO: 3284 - RNA, 22 nt, Homo Sapiens
ugcuaguaccuguaagcauuuu

SEQ ID NO: 3285 - RNA, 20 nt, Homo Sapiens
uguaggaguaaagauaaaag

SEQ ID NO: 3286 - RNA, 26 nt, Homo Sapiens
ugucccugugguacccuggcagagaa

SEQ ID NO: 3287 - RNA, 27 nt, Homo Sapiens
uugaggggagaggaaaucuuaagauua

SEQ ID NO: 3288 - RNA, 27 nt, Homo Sapiens
uucaaagcucuaauagagucacagcuu

SEQ ID NO: 3289 - RNA, 23 nt, Homo Sapiens
uuaccucccuaucaguucuagca

SEQ ID NO: 3290 - RNA, 21 nt, Homo Sapiens
uguuauucucggacugugaau

SEQ ID NO: 3291 - RNA, 19 nt, Homo Sapiens
uucuacaaguaauuuugca

SEQ ID NO: 3292 - RNA, 24 nt, Homo Sapiens
uucuacaaguaauuuugcacagac

SEQ ID NO: 3293 - RNA, 27 nt, Homo Sapiens
uucuacaaguaauuuugcacagacauc

SEQ ID NO: 3294 - RNA, 26 nt, Homo Sapiens
uucauugucucuaucugaaccacccu

SEQ ID NO: 3295 - RNA, 21 nt, Homo Sapiens
uuccuacccucucuaauggcc

SEQ ID NO: 3296 - RNA, 23 nt, Homo Sapiens
uuccuguucaugacagcuacuaa

SEQ ID NO: 3297 - RNA, 23 nt, Homo Sapiens
auucuccaacccaaaguauucuu

SEQ ID NO: 3298 - RNA, 21 nt, Homo Sapiens
auguugggaaaaacuggcuuu

SEQ ID NO: 3299 - RNA, 25 nt, Homo Sapiens
augggaaagggugaggacuucacaa

SEQ ID NO: 3300 - RNA, 22 nt, Homo Sapiens
caccacccagacuugggggcag

SEQ ID NO: 3301 - RNA, 22 nt, Homo Sapiens
caccauuccuuuaaauucucca

SEQ ID NO: 3302 - RNA, 27 nt, Homo Sapiens
cacucacugcauuuggggccuuuccca

SEQ ID NO: 3303 - RNA, 22 nt, Homo Sapiens
cacugcacuuggugcugcuuug

SEQ ID NO: 3304 - RNA, 24 nt, Homo Sapiens
agggugaggacuucacaauguugg

SEQ ID NO: 3305 - RNA, 28 nt, Homo Sapiens
agggagcugaggccauucccuguaggag

SEQ ID NO: 3306 - RNA, 22 nt, Homo Sapiens
auaauuucuacccauguuggga

SEQ ID NO: 3307 - RNA, 23 nt, Homo Sapiens
aucuuaagauuacaagauaaaaa

SEQ ID NO: 3308 - RNA, 23 nt, Homo Sapiens
ccacugcacuuggugcugcuuug

SEQ ID NO: 3309 - RNA, 25 nt, Homo Sapiens
ccacauuuugcuuuauaauuucuac

SEQ ID NO: 3310 - RNA, 26 nt, Homo Sapiens
ccacccagacuugggggcaggcgcca

SEQ ID NO: 3311 - RNA, 29 nt, Homo Sapiens
ccaaguucauuaccucccuaucaguucua

SEQ ID NO: 3312 - RNA, 21 nt, Homo Sapiens
ccaagcuuguuucccugcugg

SEQ ID NO: 3313 - RNA, 22 nt, Homo Sapiens
ccccaaaucuuccucuggagcu

SEQ ID NO: 3314 - RNA, 22 nt, Homo Sapiens
accaugaagugaaaaugccaca

SEQ ID NO: 3315 - RNA, 22 nt, Homo Sapiens
acucacugcauuuggggccuuu

SEQ ID NO: 3316 - RNA, 26 nt, Homo Sapiens
acucacugcauuuggggccuuuccca

SEQ ID NO: 3317 - RNA, 20 nt, Homo Sapiens
agccucuccccugcucccgu

SEQ ID NO: 3318 - RNA, 21 nt, Homo Sapiens
agcccggacccgggggcuggc

SEQ ID NO: 3319 - RNA, 22 nt, Homo Sapiens
agacaguggcagcaaaggaaga

SEQ ID NO: 3320 - RNA, 21 nt, Homo Sapiens
aaccaacugccuuaaccuucu

SEQ ID NO: 3321 - RNA, 21 nt, Homo Sapiens
aaccaauaaaacaagaauacu

SEQ ID NO: 3322 - RNA, 19 nt, Homo Sapiens
aaguauucuucuuuucuua

SEQ ID NO: 3323 - RNA, 26 nt, Homo Sapiens
ccuucaguaucaaggcugccuggaga

SEQ ID NO: 3324 - RNA, 25 nt, Homo Sapiens
ccucuccugagaagccaccagcacc

SEQ ID NO: 3325 - RNA, 26 nt, Homo Sapiens
ccugccuggauuucuuccuauuaggc

SEQ ID NO: 3326 - RNA, 22 nt, Homo Sapiens
ccggaucccagccucuccccug

SEQ ID NO: 3327 - RNA, 23 nt, Homo Sapiens
gaugggaagggcuuaucuagcca

SEQ ID NO: 3328 - RNA, 22 nt, Homo Sapiens
gauuagcuagacuaggagacca

SEQ ID NO: 3329 - RNA, 21 nt, Homo Sapiens
gaccacaccuccgugguucac

SEQ ID NO: 3330 - RNA, 26 nt, Homo Sapiens
gaagagaccaagcuuguuucccugcu

SEQ ID NO: 3331 - RNA, 21 nt, Homo Sapiens
cuuuucugugguugcagccug

SEQ ID NO: 3332 - RNA, 22 nt, Homo Sapiens
cuuccuacccucucuaauggcc

SEQ ID NO: 3333 - RNA, 22 nt, Homo Sapiens
cuuaacaacagcuucuugcuug

SEQ ID NO: 3334 - RNA, 23 nt, Homo Sapiens
cuguauuuuuaaauucugcuccu

SEQ ID NO: 3335 - RNA, 19 nt, Homo Sapiens
cugagucaguuuuuuaucu

SEQ ID NO: 3336 - RNA, 27 nt, Homo Sapiens
ggcagagaagagaccaagcuuguuucc

SEQ ID NO: 3337 - RNA, 21 nt, Homo Sapiens
gggcuccggaucccagccucu

SEQ ID NO: 3338 - RNA, 22 nt, Homo Sapiens
gggaaagggugaggacuucaca

SEQ ID NO: 3339 - RNA, 26 nt, Homo Sapiens
gucuccauuuuucccaggacaggaaa

SEQ ID NO: 3340 - RNA, 22 nt, Homo Sapiens
gucaguaggagaggaugcacag

SEQ ID NO: 3341 - RNA, 24 nt, Homo Sapiens
gucccauucuccacucacugcauu

SEQ ID NO: 3342 - RNA, 22 nt, Homo Sapiens
ggguuccagggacuguaccugu

SEQ ID NO: 3343 - RNA, 27 nt, Homo Sapiens
ggguucucuucauucccacugcacuug

SEQ ID NO: 3344 - RNA, 21 nt, Homo Sapiens
guauuuuuaaauucugcuccu

SEQ ID NO: 3345 - RNA, 20 nt, Homo Sapiens
ggagaaggaaaaggcuggca

SEQ ID NO: 3346 - RNA, 21 nt, Homo Sapiens
ggagaagggagaacagggguc

SEQ ID NO: 3347 - RNA, 24 nt, Homo Sapiens
ggagacacagauggcaccuguggc

SEQ ID NO: 3348 - RNA, 22 nt, Homo Sapiens
ggaaagggugaggacuucacaa

SEQ ID NO: 3349 - RNA, 23 nt, Homo Sapiens
ggagagggaaauacaaggagggc

SEQ ID NO: 3350 - RNA, 21 nt, Homo Sapiens
gcuaguaccuguaagcauuuu

SEQ ID NO: 3351 - RNA, 24 nt, Homo Sapiens
gcgugugucccugugguacccugg

SEQ ID NO: 3352 - RNA, 27 nt, Homo Sapiens
gccagugcgagcccagagggcccgaag

SEQ ID NO: 3353 - RNA, 23 nt, Homo Sapiens
gccagggacggacgugggccagu

SEQ ID NO: 3354 - RNA, 17 nt, Homo Sapiens
gccagaauucacuagga

SEQ ID NO: 3355 - RNA, 22 nt, Homo Sapiens
gccuucuccccucccgcgagcc

SEQ ID NO: 3356 - RNA, 27 nt, Homo Sapiens
gccugagcccggcgaggguggggaggg

SEQ ID NO: 3357 - RNA, 30 nt, Homo Sapiens
ggugcgcgcccaucccugcccgcagccccg

SEQ ID NO: 3358 - RNA, 21 nt, Homo Sapiens
guggguuucucugugcucuga

SEQ ID NO: 3359 - RNA, 25 nt, Homo Sapiens
cuugucuuaaucguccugcugcugc

SEQ ID NO: 3360 - RNA, 24 nt, Homo Sapiens
gaugguccucacaagccucuucug

SEQ ID NO: 3361 - RNA, 22 nt, Homo Sapiens
gauggcaggagaaucagccugg

SEQ ID NO: 3362 - RNA, 24 nt, Homo Sapiens
ccgcucagucuuugagcgagccca

SEQ ID NO: 3363 - RNA, 22 nt, Homo Sapiens
ccugcugcugcugccguuccgg

SEQ ID NO: 3364 - RNA, 21 nt, Homo Sapiens
cucccagaugccuucuagauu

SEQ ID NO: 3365 - RNA, 21 nt, Homo Sapiens
cugagcccggcgagggugggg

SEQ ID NO: 3366 - RNA, 21 nt, Homo Sapiens
cgucuguggagccauccuccu

SEQ ID NO: 3367 - RNA, 27 nt, Homo Sapiens
aaccaaaacagaguggauugggcugca

SEQ ID NO: 3368 - RNA, 22 nt, Homo Sapiens
agaccuggaaccagagccacag

SEQ ID NO: 3369 - RNA, 18 nt, Homo Sapiens
agccagaauucacuagga

SEQ ID NO: 3370 - RNA, 20 nt, Homo Sapiens
agccuccuccccucccgcga

SEQ ID NO: 3371 - RNA, 25 nt, Homo Sapiens
accggcuaggcugggcgcgcccccc

SEQ ID NO: 3372 - RNA, 18 nt, Homo Sapiens
acaggaagcuuuuuguau

SEQ ID NO: 3373 - RNA, 18 nt, Homo Sapiens
accaacauaaaacaaaac

SEQ ID NO: 3374 - RNA, 27 nt, Homo Sapiens
aaugaugaguccucucuggucagacau

SEQ ID NO: 3375 - RNA, 22 nt, Homo Sapiens
cccucccgcgagccuccucccc

SEQ ID NO: 3376 - RNA, 24 nt, Homo Sapiens
cccucacccaaaagaauuaucauc

SEQ ID NO: 3377 - RNA, 19 nt, Homo Sapiens
ccaggguccugugccugga

SEQ ID NO: 3378 - RNA, 27 nt, Homo Sapiens
ccaggaagaguucuauccccaagcugg

SEQ ID NO: 3379 - RNA, 22 nt, Homo Sapiens
ccaaaacagaguggauugggcu

SEQ ID NO: 3380 - RNA, 27 nt, Homo Sapiens
caggagaaucagccuggggccugggga

SEQ ID NO: 3381 - RNA, 18 nt, Homo Sapiens
ugugccuggaugggggug

SEQ ID NO: 3382 - RNA, 22 nt, Homo Sapiens
uugcccaggguccugugccugg

SEQ ID NO: 3383 - RNA, 25 nt, Homo Sapiens
uugcccaggguccugugccuggaug

SEQ ID NO: 3384 - RNA, 26 nt, Homo Sapiens
uugcccaggguccugugccuggaugg

SEQ ID NO: 3385 - RNA, 21 nt, Homo Sapiens
uguccccgcucagucuuugag

SEQ ID NO: 3386 - RNA, 27 nt, Homo Sapiens
ucuguucugcucccagaugccuucuag

SEQ ID NO: 3387 - RNA, 27 nt, Homo Sapiens
ucugcucccagaugccuucuagauuca

SEQ ID NO: 3388 - RNA, 19 nt, Homo Sapiens
uaauugccuuugagguuau

SEQ ID NO: 3389 - RNA, 23 nt, Homo Sapiens
guucucuucucucuucaaucucu

SEQ ID NO: 3390 - RNA, 20 nt, Homo Sapiens
uaggaggucaucaaccgaug

SEQ ID NO: 3391 - RNA, 26 nt, Homo Sapiens
ucaaugaugaguccucucuggucaga

SEQ ID NO: 3392 - RNA, 26 nt, Homo Sapiens
ucucuguucugcucccagaugccuuc

SEQ ID NO: 3393 - RNA, 22 nt, Homo Sapiens
ucaccaucuggaagaagauggg

SEQ ID NO: 3394 - RNA, 23 nt, Homo Sapiens
uguguuuuuccuccauaaauuau

SEQ ID NO: 3395 - RNA, 20 nt, Homo Sapiens
aucuacccugcugaccuccc

SEQ ID NO: 3396 - RNA, 26 nt, Homo Sapiens
agggguggggauugggggacaugggc

SEQ ID NO: 3397 - RNA, 26 nt, Homo Sapiens
agugccuucugcccucccuggagccu

SEQ ID NO: 3398 - RNA, 21 nt, Homo Sapiens
ccuucugcccucccuggagcc

SEQ ID NO: 3399 - RNA, 22 nt, Homo Sapiens
gauucaucuacccugcugaccu

SEQ ID NO: 3400 - RNA, 20 nt, Homo Sapiens
gacccucugacccuagcucu

SEQ ID NO: 3401 - RNA, 25 nt, Homo Sapiens
ggucuugaggggguaauaaaccucc

SEQ ID NO: 3402 - RNA, 22 nt, Homo Sapiens
ggccuccucuccuacuuuggga

SEQ ID NO: 3403 - RNA, 21 nt, Homo Sapiens
gcauuuuucuuacuuuuguaa

SEQ ID NO: 3404 - RNA, 27 nt, Homo Sapiens
gccugguucaauuucuuucuuuccuua

SEQ ID NO: 3405 - RNA, 29 nt, Homo Sapiens
guccaauuuacaggcuggagcagcagcug

SEQ ID NO: 3406 - RNA, 23 nt, Homo Sapiens
gagauauuaaaauaagcacagaa

SEQ ID NO: 3407 - RNA, 31 nt, Homo Sapiens
cuccuugcaaacuuuaccaucuuuguugcag

SEQ ID NO: 3408 - RNA, 25 nt, Homo Sapiens
agauauuaaaauaagcacagaaaau

SEQ ID NO: 3409 - RNA, 22 nt, Homo Sapiens
uuauguagcugaaacaaaaaug

SEQ ID NO: 3410 - RNA, 27 nt, Homo Sapiens
uuauguagcugaaacaaaaaugccaga

SEQ ID NO: 3411 - RNA, 22 nt, Homo Sapiens
uaguauuuuaccuagcauuuca

SEQ ID NO: 3412 - RNA, 27 nt, Homo Sapiens
uccuagaguagaguggagggagggugg

SEQ ID NO: 3413 - RNA, 21 nt, Homo Sapiens
ucaucucuaacagcucaggau

SEQ ID NO: 3414 - RNA, 27 nt, Homo Sapiens
uuagcauuuuaauuagauguaauuguu

SEQ ID NO: 3415 - RNA, 19 nt, Homo Sapiens
uuccagucuccaccaggaa

SEQ ID NO: 3416 - RNA, 22 nt, Homo Sapiens
ccuuguuccuagaguagagugg

SEQ ID NO: 3417 - RNA, 26 nt, Homo Sapiens
gagggaggguggccuaagaguugagc

SEQ ID NO: 3418 - RNA, 25 nt, Homo Sapiens
gcccuccagcucuuuccuccuucca

SEQ ID NO: 3419 - RNA, 26 nt, Homo Sapiens
gccaaaguuaugcaagggacugugug

SEQ ID NO: 3420 - RNA, 18 nt, Homo Sapiens
gcauggucaaaggcucaa

SEQ ID NO: 3421 - RNA, 20 nt, Homo Sapiens
gucaaugacaguuucuuuuu

SEQ ID NO: 3422 - RNA, 24 nt, Homo Sapiens
ggcauggucaaaggcucaaaccuu

SEQ ID NO: 3423 - RNA, 21 nt, Homo Sapiens
gaauuuuuaugauauuccccc

SEQ ID NO: 3424 - RNA, 20 nt, Homo Sapiens
cuuccagucagguaguugca

SEQ ID NO: 3425 - RNA, 23 nt, Homo Sapiens
ccuguuccaugaaggcagagcca

SEQ ID NO: 3426 - RNA, 23 nt, Homo Sapiens
ccugccucuucccccauucucau

SEQ ID NO: 3427 - RNA, 21 nt, Homo Sapiens
cuccaggccucagcaggugcg

SEQ ID NO: 3428 - RNA, 23 nt, Homo Sapiens
cucucauuuugaccuacucucau

SEQ ID NO: 3429 - RNA, 20 nt, Homo Sapiens
cuaccucaaacuuccaguca

SEQ ID NO: 3430 - RNA, 27 nt, Homo Sapiens
cucagcaggugcggagccgucacugca

SEQ ID NO: 3431 - RNA, 23 nt, Homo Sapiens
agcacucagcccgggaggcaggc

SEQ ID NO: 3432 - RNA, 22 nt, Homo Sapiens
agccuguuccaugaaggcagag

SEQ ID NO: 3433 - RNA, 24 nt, Homo Sapiens
aggcaaugauuguuaauuuacagc

SEQ ID NO: 3434 - RNA, 18 nt, Homo Sapiens
acagcccauuucuccaua

SEQ ID NO: 3435 - RNA, 21 nt, Homo Sapiens
accuacucucaugcugcagag

SEQ ID NO: 3436 - RNA, 21 nt, Homo Sapiens
aaacuguugauuauuagccag

SEQ ID NO: 3437 - RNA, 22 nt, Homo Sapiens
aaagcaauaaaugaaugggcug

SEQ ID NO: 3438 - RNA, 17 nt, Homo Sapiens
cagcccauuucuccaua

SEQ ID NO: 3439 - RNA, 21 nt, Homo Sapiens
ccauuuaucugggauuauggu

SEQ ID NO: 3440 - RNA, 23 nt, Homo Sapiens
uccaugaaggcagagccauggac

SEQ ID NO: 3441 - RNA, 24 nt, Homo Sapiens
uauccguggccacagcugguuggc

SEQ ID NO: 3442 - RNA, 23 nt, Homo Sapiens
uaacugcauuuuagaccauuuau

SEQ ID NO: 3443 - RNA, 20 nt, Homo Sapiens
ugucaaugacaguuucuuuu

SEQ ID NO: 3444 - RNA, 26 nt, Homo Sapiens
ugguuggcgucgccuugaaaucccag

SEQ ID NO: 3445 - RNA, 20 nt, Homo Sapiens
ugcugccagaaccuugggga

SEQ ID NO: 3446 - RNA, 27 nt, Homo Sapiens
ucugcuugauuuuugccucuuccaguc

SEQ ID NO: 3447 - RNA, 20 nt, Homo Sapiens
ugccuagacccggcgcagca

SEQ ID NO: 3448 - RNA, 21 nt, Homo Sapiens
uacagagucuggugaagcuca

SEQ ID NO: 3449 - RNA, 27 nt, Homo Sapiens
ucccugccucucaucaacugaaugagg

SEQ ID NO: 3450 - RNA, 16 nt, Homo Sapiens
uccaacuaaugccuua

SEQ ID NO: 3451 - RNA, 23 nt, Homo Sapiens
uucagcaaacucuuuucccacug

SEQ ID NO: 3452 - RNA, 23 nt, Homo Sapiens
uuagaaaacauaaucuucugccu

SEQ ID NO: 3453 - RNA, 24 nt, Homo Sapiens
uuucagcaaacucuuuucccacug

SEQ ID NO: 3454 - RNA, 22 nt, Homo Sapiens
uuuucagcaaacucuuuuccca

SEQ ID NO: 3455 - RNA, 21 nt, Homo Sapiens
cccugcucaguaaagcacuug

SEQ ID NO: 3456 - RNA, 20 nt, Homo Sapiens
cagcccagggaaaccuccuc

SEQ ID NO: 3457 - RNA, 22 nt, Homo Sapiens
cagcaaacucuuuucccacugu

SEQ ID NO: 3458 - RNA, 20 nt, Homo Sapiens
ccaacaaccucaacugccua

SEQ ID NO: 3459 - RNA, 20 nt, Homo Sapiens
auacaagaucuuccuuccuc

SEQ ID NO: 3460 - RNA, 22 nt, Homo Sapiens
aaccaacaaccucaacugccua

SEQ ID NO: 3461 - RNA, 21 nt, Homo Sapiens
aaccucaacugccuacuccaa

SEQ ID NO: 3462 - RNA, 23 nt, Homo Sapiens
aaccuguuaccuacuuugacuuu

SEQ ID NO: 3463 - RNA, 20 nt, Homo Sapiens
aacucugcuugauuuuugcc

SEQ ID NO: 3464 - RNA, 20 nt, Homo Sapiens
acagagucuggugaagcuca

SEQ ID NO: 3465 - RNA, 21 nt, Homo Sapiens
accaacaaccucaacugccua

SEQ ID NO: 3466 - RNA, 21 nt, Homo Sapiens
agccugcacaauaaaaauguu

SEQ ID NO: 3467 - RNA, 24 nt, Homo Sapiens
agaugggggaggaggcaguaauaa

SEQ ID NO: 3468 - RNA, 21 nt, Homo Sapiens
agaaaacauaaucuucugccu

SEQ ID NO: 3469 - RNA, 22 nt, Homo Sapiens
ccucccagccaccgccccccuc

SEQ ID NO: 3470 - RNA, 20 nt, Homo Sapiens
ccuuaaagcacagcccaggg

SEQ ID NO: 3471 - RNA, 23 nt, Homo Sapiens
ccuuuuaauuuuccuggugccaa

SEQ ID NO: 3472 - RNA, 22 nt, Homo Sapiens
cuuuuaaacuguguacauaacu

SEQ ID NO: 3473 - RNA, 22 nt, Homo Sapiens
cugccagaaccuuggggaugug

SEQ ID NO: 3474 - RNA, 24 nt, Homo Sapiens
cugccuacuccaaaauguugguca

SEQ ID NO: 3475 - RNA, 21 nt, Homo Sapiens
gaaguauuuugcuggaauaag

SEQ ID NO: 3476 - RNA, 22 nt, Homo Sapiens
gaacucaaacugaggaauuuca

SEQ ID NO: 3477 - RNA, 21 nt, Homo Sapiens
gaggggcuguaaaauggaggc

SEQ ID NO: 3478 - RNA, 27 nt, Homo Sapiens
gaggcucccucccagccaccgcccccc

SEQ ID NO: 3479 - RNA, 26 nt, Homo Sapiens
gauugcugaaauuuuauaugcuuacu

SEQ ID NO: 3480 - RNA, 21 nt, Homo Sapiens
ggucauuuuauguuaagggaa

SEQ ID NO: 3481 - RNA, 23 nt, Homo Sapiens
gccuccaaggaggggcuguaaaa

SEQ ID NO: 3482 - RNA, 23 nt, Homo Sapiens
gcuuuuuauuccuccugcucaua

SEQ ID NO: 3483 - RNA, 24 nt, Homo Sapiens
gcugccugguauauccaaaagcuu

SEQ ID NO: 3484 - RNA, 27 nt, Homo Sapiens
gcacuguucugauuauguaagcauuug

SEQ ID NO: 3485 - RNA, 32 nt, Homo Sapiens
gcacuguucugauuauguaagcauuuguacau

SEQ ID NO: 3486 - RNA, 20 nt, Homo Sapiens
gauugggauacuguaauacu

SEQ ID NO: 3487 - RNA, 22 nt, Homo Sapiens
cuuuggaaauaaaagauaaaag

SEQ ID NO: 3488 - RNA, 20 nt, Homo Sapiens
cuuggaccccaggucuggag

SEQ ID NO: 3489 - RNA, 24 nt, Homo Sapiens
cgggacggccgggcugggagcugg

SEQ ID NO: 3490 - RNA, 21 nt, Homo Sapiens
acaguaaguugacaccacuua

SEQ ID NO: 3491 - RNA, 23 nt, Homo Sapiens
accacuguucuguucauuuccua

SEQ ID NO: 3492 - RNA, 20 nt, Homo Sapiens
acuguaauacuucuuuguua

SEQ ID NO: 3493 - RNA, 25 nt, Homo Sapiens
aacauaaaagcaccacuguucuguu

SEQ ID NO: 3494 - RNA, 26 nt, Homo Sapiens
aacauaaaagcaccacuguucuguuc

SEQ ID NO: 3495 - RNA, 24 nt, Homo Sapiens
aagauguuucauuuuacuguauau

SEQ ID NO: 3496 - RNA, 19 nt, Homo Sapiens
augauccuggaaauugcag

SEQ ID NO: 3497 - RNA, 26 nt, Homo Sapiens
aguauacauuuuauaaugaugaacuu

SEQ ID NO: 3498 - RNA, 25 nt, Homo Sapiens
agggacauuucuauaaaaauacuac

SEQ ID NO: 3499 - RNA, 21 nt, Homo Sapiens
cagauugcuuaaaagcauuuu

SEQ ID NO: 3500 - RNA, 27 nt, Homo Sapiens
cagauugcuuaaaagcauuuuuauuau

SEQ ID NO: 3501 - RNA, 23 nt, Homo Sapiens
cccauuaaaaaugagauuucuua

SEQ ID NO: 3502 - RNA, 21 nt, Homo Sapiens
uacuguaauacuucuuuguua

SEQ ID NO: 3503 - RNA, 23 nt, Homo Sapiens
ucagauugcuuaaaagcauuuuu

SEQ ID NO: 3504 - RNA, 21 nt, Homo Sapiens
ugcuccugccacuagguuuca

SEQ ID NO: 3505 - RNA, 27 nt, Homo Sapiens
uggggaagugcggugacugggaaaugc

SEQ ID NO: 3506 - RNA, 20 nt, Homo Sapiens
ccagcgcacagccugggcag

SEQ ID NO: 3507 - RNA, 26 nt, Homo Sapiens
caucccugcaccaggacucaccaaga

SEQ ID NO: 3508 - RNA, 27 nt, Homo Sapiens
caagacgcccauccuggaaaagguccc

SEQ ID NO: 3509 - RNA, 26 nt, Homo Sapiens
aggcagcagagccgaggagagcaggu

SEQ ID NO: 3510 - RNA, 25 nt, Homo Sapiens
cgcgucaggcccagcgcacagccug

SEQ ID NO: 3511 - RNA, 24 nt, Homo Sapiens
gcacagccugggcagcucagccug

SEQ ID NO: 3512 - RNA, 21 nt, Homo Sapiens
gagcuaggggcaggaggcaug

SEQ ID NO: 3513 - RNA, 23 nt, Homo Sapiens
gagaaaggaguaggagccuagca

SEQ ID NO: 3514 - RNA, 25 nt, Homo Sapiens
gccucaaggggugcggcccucucag

SEQ ID NO: 3515 - RNA, 24 nt, Homo Sapiens
gcgucaggcccagcgcacagccug

SEQ ID NO: 3516 - RNA, 27 nt, Homo Sapiens
gcucagccugucagcugagcacgggcg

SEQ ID NO: 3517 - RNA, 18 nt, Homo Sapiens
gcuuugagaaaggaguag

SEQ ID NO: 3518 - RNA, 20 nt, Homo Sapiens
ggugacugggaaaugcugag

SEQ ID NO: 3519 - RNA, 19 nt, Homo Sapiens
guccgaccucuggaaaugu

SEQ ID NO: 3520 - RNA, 21 nt, Homo Sapiens
ggcucacacccccgcccacac

SEQ ID NO: 3521 - RNA, 25 nt, Homo Sapiens
cgcccagccucuccccgcucuggau

SEQ ID NO: 3522 - RNA, 27 nt, Homo Sapiens
ccuuacgggggcaucuugaguccagcu

SEQ ID NO: 3523 - RNA, 24 nt, Homo Sapiens
agccucuccccgcucuggauccug

SEQ ID NO: 3524 - RNA, 16 nt, Homo Sapiens
agaacagaauugcucc

SEQ ID NO: 3525 - RNA, 19 nt, Homo Sapiens
accgcaaaaagcaccggga

SEQ ID NO: 3526 - RNA, 22 nt, Homo Sapiens
aaccaggccccagccuccaggc

SEQ ID NO: 3527 - RNA, 24 nt, Homo Sapiens
cccagccucuccccgcucuggauc

SEQ ID NO: 3528 - RNA, 21 nt, Homo Sapiens
ccccgcucuggauccugcacu

SEQ ID NO: 3529 - RNA, 21 nt, Homo Sapiens
uccaggcccccaacuccgccc

SEQ ID NO: 3530 - RNA, 24 nt, Homo Sapiens
ucucucuuccuugcuuucucuucu

SEQ ID NO: 3531 - RNA, 19 nt, Homo Sapiens
guugauuuaaacucuuaga

SEQ ID NO: 3532 - RNA, 26 nt, Homo Sapiens
uggcuaacuuuuauuaucuucuauau

SEQ ID NO: 3533 - RNA, 26 nt, Homo Sapiens
uggagaucuuaagauuccauuuugga

SEQ ID NO: 3534 - RNA, 22 nt, Homo Sapiens
ucugaacuuuggaagcugggga

SEQ ID NO: 3535 - RNA, 21 nt, Homo Sapiens
uugaucaugaaucacugcacc

SEQ ID NO: 3536 - RNA, 22 nt, Homo Sapiens
uuuucuuucuuuuuucucugac

SEQ ID NO: 3537 - RNA, 21 nt, Homo Sapiens
cagguauuuucaucaaguagc

SEQ ID NO: 3538 - RNA, 26 nt, Homo Sapiens
cagacucuuuaguugauuuaaacucu

SEQ ID NO: 3539 - RNA, 23 nt, Homo Sapiens
agucccuucucucuuccuugcuu

SEQ ID NO: 3540 - RNA, 25 nt, Homo Sapiens
agggugaggcccacucuguuccuac

SEQ ID NO: 3541 - RNA, 22 nt, Homo Sapiens
aguaauacagccugguuuucaa

SEQ ID NO: 3542 - RNA, 21 nt, Homo Sapiens
aguugaguuaagggauggcuu

SEQ ID NO: 3543 - RNA, 27 nt, Homo Sapiens
aacaacaagaaaauguacaguuagucc

SEQ ID NO: 3544 - RNA, 22 nt, Homo Sapiens
aaacccagcugacuuguuuccu

SEQ ID NO: 3545 - RNA, 20 nt, Homo Sapiens
acugaguuugaacacagauc

SEQ ID NO: 3546 - RNA, 20 nt, Homo Sapiens
aaucacugcaccucuuuguc

SEQ ID NO: 3547 - RNA, 24 nt, Homo Sapiens
agacaacaggcauuuucuuucuuu

SEQ ID NO: 3548 - RNA, 18 nt, Homo Sapiens
ccuucucucuuccuugcu

SEQ ID NO: 3549 - RNA, 21 nt, Homo Sapiens
cugaccaccugcagccuguug

SEQ ID NO: 3550 - RNA, 21 nt, Homo Sapiens
cugaacuuuggaagcugggga

SEQ ID NO: 3551 - RNA, 18 nt, Homo Sapiens
gagaaaacaggcucacag

SEQ ID NO: 3552 - RNA, 26 nt, Homo Sapiens
cuggaaaacagcugcuguuagauguc

SEQ ID NO: 3553 - RNA, 23 nt, Homo Sapiens
cugcaccucuuugucacagggug

SEQ ID NO: 3554 - RNA, 21 nt, Homo Sapiens
ggcggugaggagggcagcugg

SEQ ID NO: 3555 - RNA, 23 nt, Homo Sapiens
gucccuucucucuuccuugcuuu

SEQ ID NO: 3556 - RNA, 22 nt, Homo Sapiens
ggggugugauuugugugcgugc

SEQ ID NO: 3557 - RNA, 24 nt, Homo Sapiens
ggacuuagucaugaggagagggug

SEQ ID NO: 3558 - RNA, 21 nt, Homo Sapiens
gcauacaaguuuagccugggg

SEQ ID NO: 3559 - RNA, 22 nt, Homo Sapiens
gcaguguaacccaagcauuugu

SEQ ID NO: 3560 - RNA, 27 nt, Homo Sapiens
gcaguguaacccaagcauuuguggaca

SEQ ID NO: 3561 - RNA, 19 nt, Homo Sapiens
gccacugccaccugccucc

SEQ ID NO: 3562 - RNA, 24 nt, Homo Sapiens
gcccgaccuggggcugagugcaga

SEQ ID NO: 3563 - RNA, 26 nt, Homo Sapiens
gcugccucuaccggcuggcggcugua

SEQ ID NO: 3564 - RNA, 23 nt, Homo Sapiens
ggugaagccucugggcuuccuga

SEQ ID NO: 3565 - RNA, 27 nt, Homo Sapiens
ggugaagccucugggcuuccugaagcc

SEQ ID NO: 3566 - RNA, 27 nt, Homo Sapiens
ggcccgaccuggggcugagugcagagg

SEQ ID NO: 3567 - RNA, 22 nt, Homo Sapiens
ggcuguaacucagcgaccuugg

SEQ ID NO: 3568 - RNA, 20 nt, Homo Sapiens
cggcccagagggugggcgcg

SEQ ID NO: 3569 - RNA, 25 nt, Homo Sapiens
ccgaugccaccacagccaucgccac

SEQ ID NO: 3570 - RNA, 22 nt, Homo Sapiens
agcaggagacuggcaagagcuc

SEQ ID NO: 3571 - RNA, 27 nt, Homo Sapiens
aggggccagggugugagguuucaccuc

SEQ ID NO: 3572 - RNA, 24 nt, Homo Sapiens
cagaggcugagcaggacguuaggc

SEQ ID NO: 3573 - RNA, 22 nt, Homo Sapiens
cagggugugagguuucaccucc

SEQ ID NO: 3574 - RNA, 21 nt, Homo Sapiens
caggaccuggagacaggauug

SEQ ID NO: 3575 - RNA, 22 nt, Homo Sapiens
ccaaugccacagccaagcccac

SEQ ID NO: 3576 - RNA, 27 nt, Homo Sapiens
ccccugccacugccacaacccccgaug

SEQ ID NO: 3577 - RNA, 23 nt, Homo Sapiens
cccgcugaaucuuggcucuuguc

SEQ ID NO: 3578 - RNA, 25 nt, Homo Sapiens
cccugccacugccacaacccccgau

SEQ ID NO: 3579 - RNA, 21 nt, Homo Sapiens
cccuccagagcaggagacugg

SEQ ID NO: 3580 - RNA, 21 nt, Homo Sapiens
ucucaccagcucagccccggc

SEQ ID NO: 3581 - RNA, 24 nt, Homo Sapiens
uccuccagggggccugcaggcccc

SEQ ID NO: 3582 - RNA, 27 nt, Homo Sapiens
uccuccagggggccugcaggccccagc

SEQ ID NO: 3583 - RNA, 22 nt, Homo Sapiens
ucgccacugccaccugccuccc

SEQ ID NO: 3584 - RNA, 25 nt, Homo Sapiens
ucccaggaccuggagacaggauugu

SEQ ID NO: 3585 - RNA, 22 nt, Homo Sapiens
uagagggagagagggagagagc

SEQ ID NO: 3586 - RNA, 22 nt, Homo Sapiens
uuugaaacaacuuucucuugua

SEQ ID NO: 3587 - RNA, 23 nt, Homo Sapiens
auagagggagagagggagagagc

SEQ ID NO: 3588 - RNA, 20 nt, Homo Sapiens
acagaagucacucaauuguu

SEQ ID NO: 3589 - RNA, 20 nt, Homo Sapiens
gagggagagagggagagagc

SEQ ID NO: 3590 - RNA, 21 nt, Homo Sapiens
gggagagagggagagagccua

SEQ ID NO: 3591 - RNA, 22 nt, Homo Sapiens
gggagagagggagagagccuau

SEQ ID NO: 3592 - RNA, 27 nt, Homo Sapiens
gggagagagggagagagccuauacccc

SEQ ID NO: 3593 - RNA, 24 nt, Homo Sapiens
gcugcucuuaugccauuuguuuau

SEQ ID NO: 3594 - RNA, 22 nt, Homo Sapiens
accccucacacucaccuagcca

SEQ ID NO: 3595 - RNA, 26 nt, Homo Sapiens
ucacacucaccuagccaccauggaca

SEQ ID NO: 3596 - RNA, 14 nt, Homo Sapiens
ugcccuuucuugaa

SEQ ID NO: 3597 - RNA, 19 nt, Homo Sapiens
ugcaguugggcaaggucag

SEQ ID NO: 3598 - RNA, 23 nt, Homo Sapiens
ugacaacuaaacaaggcauucag

SEQ ID NO: 3599 - RNA, 22 nt, Homo Sapiens
uggauuuccaguuuuucuuuac

SEQ ID NO: 3600 - RNA, 25 nt, Homo Sapiens
ugucaacaaagugcuuuuucacugc

SEQ ID NO: 3601 - RNA, 20 nt, Homo Sapiens
uaggcuucagguugcauugg

SEQ ID NO: 3602 - RNA, 21 nt, Homo Sapiens
guuaacuuggaaaucaguaga

SEQ ID NO: 3603 - RNA, 22 nt, Homo Sapiens
uaaagaagaaaagcgcguugug

SEQ ID NO: 3604 - RNA, 24 nt, Homo Sapiens
uuguguauauuacaccaaugccgc

SEQ ID NO: 3605 - RNA, 20 nt, Homo Sapiens
uuaacuuggaaaucaguaga

SEQ ID NO: 3606 - RNA, 24 nt, Homo Sapiens
acagaauaguuuacacacugugug

SEQ ID NO: 3607 - RNA, 23 nt, Homo Sapiens
acaaagugcuuuuucacugccua

SEQ ID NO: 3608 - RNA, 23 nt, Homo Sapiens
acaaaagcggaagaugcugcagu

SEQ ID NO: 3609 - RNA, 32 nt, Homo Sapiens
gcucagacaacaaaagcggaagaugcugcagu

SEQ ID NO: 3610 - RNA, 26 nt, Homo Sapiens
gccucccccgacuccuggguguggga

SEQ ID NO: 3611 - RNA, 25 nt, Homo Sapiens
gcguaaggguuaucguuaagcacaa

SEQ ID NO: 3612 - RNA, 21 nt, Homo Sapiens
gcauucagcaguuucugacaa

SEQ ID NO: 3613 - RNA, 27 nt, Homo Sapiens
ggcucagacaacaaaagcggaagaugc

SEQ ID NO: 3614 - RNA, 23 nt, Homo Sapiens
gugacaacuaaacaaggcauuca

SEQ ID NO: 3615 - RNA, 23 nt, Homo Sapiens
gacggcuucucacgcuuuguuua

SEQ ID NO: 3616 - RNA, 20 nt, Homo Sapiens
cugggugugggagcagggca

SEQ ID NO: 3617 - RNA, 19 nt, Homo Sapiens
cugguucccaccucagccu

SEQ ID NO: 3618 - RNA, 19 nt, Homo Sapiens
cugggcuggugugcagugg

SEQ ID NO: 3619 - RNA, 28 nt, Homo Sapiens
gcacagagcguccuucccccuguagacu

SEQ ID NO: 3620 - RNA, 23 nt, Homo Sapiens
ccgcuccgcugcgcgcaggcugg

SEQ ID NO: 3621 - RNA, 31 nt, Homo Sapiens
ccggcaaccgcuccggcaacgccaaccgcuc

SEQ ID NO: 3622 - RNA, 26 nt, Homo Sapiens
cgcgcaggcugggcugcaggcucucg

SEQ ID NO: 3623 - RNA, 21 nt, Homo Sapiens
cuccaagcaaguagcuuucca

SEQ ID NO: 3624 - RNA, 21 nt, Homo Sapiens
gggcuggugugcaguggugcg

SEQ ID NO: 3625 - RNA, 23 nt, Homo Sapiens
gggcuggugugcaguggugcgac

SEQ ID NO: 3626 - RNA, 21 nt, Homo Sapiens
gcgcugggcuggugugcagug

SEQ ID NO: 3627 - RNA, 20 nt, Homo Sapiens
gccugugguuacagugcaga

SEQ ID NO: 3628 - RNA, 20 nt, Homo Sapiens
gcgcaggcugggcugcaggc

SEQ ID NO: 3629 - RNA, 22 nt, Homo Sapiens
gcugggcugcaggcucucggcu

SEQ ID NO: 3630 - RNA, 21 nt, Homo Sapiens
agccugugguuacagugcaga

SEQ ID NO: 3631 - RNA, 22 nt, Homo Sapiens
agcgcugggcuggugugcagug

SEQ ID NO: 3632 - RNA, 23 nt, Homo Sapiens
agcgcugggcuggugugcagugg

SEQ ID NO: 3633 - RNA, 27 nt, Homo Sapiens
agcgcugggcuggugugcaguggugcg

SEQ ID NO: 3634 - RNA, 20 nt, Homo Sapiens
agccucccgaguaguggauc

SEQ ID NO: 3635 - RNA, 21 nt, Homo Sapiens
aaccucucugaucuugugcuc

SEQ ID NO: 3636 - RNA, 29 nt, Homo Sapiens
aguuugcaaugucacaaccucucugaucu

SEQ ID NO: 3637 - RNA, 22 nt, Homo Sapiens
cacaaccucucugaucuugugc

SEQ ID NO: 3638 - RNA, 27 nt, Homo Sapiens
cacaaccucucugaucuugugcucagc

SEQ ID NO: 3639 - RNA, 22 nt, Homo Sapiens
caaccucucugaucuugugcuc

SEQ ID NO: 3640 - RNA, 25 nt, Homo Sapiens
cccagccugugguuacagugcagac

SEQ ID NO: 3641 - RNA, 26 nt, Homo Sapiens
cccagccugugguuacagugcagaca

SEQ ID NO: 3642 - RNA, 23 nt, Homo Sapiens
cagcgcugggcuggugugcagug

SEQ ID NO: 3643 - RNA, 22 nt, Homo Sapiens
uucacguaagauacaaguuuca

SEQ ID NO: 3644 - RNA, 26 nt, Homo Sapiens
ugugagccaccgcugccagcacagag

SEQ ID NO: 3645 - RNA, 22 nt, Homo Sapiens
ugggcuggugugcaguggugcg

SEQ ID NO: 3646 - RNA, 26 nt, Homo Sapiens
ugcaaugucacaaccucucugaucuu

SEQ ID NO: 3647 - RNA, 19 nt, Homo Sapiens
ucucggggacacaggccag

SEQ ID NO: 3648 - RNA, 27 nt, Homo Sapiens
ccagcuccacaguguugccagagccuu

SEQ ID NO: 3649 - RNA, 26 nt, Homo Sapiens
cucggggacacaggccagcuccacag

SEQ ID NO: 3650 - RNA, 28 nt, Homo Sapiens
gacacaggccagcuccacaguguugcca

SEQ ID NO: 3651 - RNA, 21 nt, Homo Sapiens
gcacccuagaggacuagggua

SEQ ID NO: 3652 - RNA, 19 nt, Homo Sapiens
cuuccacgauggugcagug

SEQ ID NO: 3653 - RNA, 22 nt, Homo Sapiens
cuuccuacuuugcuucucucca

SEQ ID NO: 3654 - RNA, 16 nt, Homo Sapiens
cuucccuucuuugcac

SEQ ID NO: 3655 - RNA, 20 nt, Homo Sapiens
cugacuucucacuuccuaag

SEQ ID NO: 3656 - RNA, 19 nt, Homo Sapiens
ccuacuuugcuucucucca

SEQ ID NO: 3657 - RNA, 21 nt, Homo Sapiens
ccuuccuacuuugcuucucuc

SEQ ID NO: 3658 - RNA, 20 nt, Homo Sapiens
gucuauguuuucuacuccaa

SEQ ID NO: 3659 - RNA, 22 nt, Homo Sapiens
guacagguacaggcuggagauu

SEQ ID NO: 3660 - RNA, 21 nt, Homo Sapiens
caguguaacgaugcacuuugg

SEQ ID NO: 3661 - RNA, 21 nt, Homo Sapiens
aauaaaucuagcaccccugau

SEQ ID NO: 3662 - RNA, 25 nt, Homo Sapiens
ucuauucauaagucuuugguacaag

SEQ ID NO: 3663 - RNA, 21 nt, Homo Sapiens
uccugcucuuccauuucuucc

SEQ ID NO: 3664 - RNA, 20 nt, Homo Sapiens
uccuacuuugcuucucucca

SEQ ID NO: 3665 - RNA, 22 nt, Homo Sapiens
uccucaagguagaaaugucuau

SEQ ID NO: 3666 - RNA, 26 nt, Homo Sapiens
uccauccugcucuuccauuucuucca

SEQ ID NO: 3667 - RNA, 19 nt, Homo Sapiens
ugacuucucacuuccuaag

SEQ ID NO: 3668 - RNA, 20 nt, Homo Sapiens
ucuuccacgauggugcagug

SEQ ID NO: 3669 - RNA, 18 nt, Homo Sapiens
uugaagcagaugugguga

SEQ ID NO: 3670 - RNA, 21 nt, Homo Sapiens
uugucccagggcugaugcugu

SEQ ID NO: 3671 - RNA, 22 nt, Homo Sapiens
uuuccagccgaucacuggagcu

SEQ ID NO: 3672 - RNA, 22 nt, Homo Sapiens
uuggcucaccaacccugcaggc

SEQ ID NO: 3673 - RNA, 22 nt, Homo Sapiens
uuccaggguugaaucuuguccc

SEQ ID NO: 3674 - RNA, 20 nt, Homo Sapiens
uuacagccacaggcacugug

SEQ ID NO: 3675 - RNA, 19 nt, Homo Sapiens
uguguuccuggagaaggca

SEQ ID NO: 3676 - RNA, 20 nt, Homo Sapiens
uguguggaaagucagaggaa

SEQ ID NO: 3677 - RNA, 21 nt, Homo Sapiens
ugaaucuucccugucaggcuc

SEQ ID NO: 3678 - RNA, 24 nt, Homo Sapiens
ugucaucugaguugagcacugguc

SEQ ID NO: 3679 - RNA, 21 nt, Homo Sapiens
uguaguuaauuucagugccuu

SEQ ID NO: 3680 - RNA, 26 nt, Homo Sapiens
uggauggaguuaaacuugaugccagu

SEQ ID NO: 3681 - RNA, 22 nt, Homo Sapiens
uggcggcagugacaggaggcgc

SEQ ID NO: 3682 - RNA, 21 nt, Homo Sapiens
ugcuccaguaaaaucuugccu

SEQ ID NO: 3683 - RNA, 22 nt, Homo Sapiens
ugcuuuccuagauccacacuuu

SEQ ID NO: 3684 - RNA, 20 nt, Homo Sapiens
ucauucuucuuggcucacca

SEQ ID NO: 3685 - RNA, 25 nt, Homo Sapiens
ucauuagcugugugacucuggguga

SEQ ID NO: 3686 - RNA, 20 nt, Homo Sapiens
ucauaccuggcuugcaggga

SEQ ID NO: 3687 - RNA, 24 nt, Homo Sapiens
guugcccugccaucgccuccauca

SEQ ID NO: 3688 - RNA, 22 nt, Homo Sapiens
uagaugaaugguuaacacgagc

SEQ ID NO: 3689 - RNA, 27 nt, Homo Sapiens
uauuacugaaagggagggguggagaug

SEQ ID NO: 3690 - RNA, 21 nt, Homo Sapiens
aagggagggguggagaugggu

SEQ ID NO: 3691 - RNA, 20 nt, Homo Sapiens
aaauccagaccuuauccaca

SEQ ID NO: 3692 - RNA, 23 nt, Homo Sapiens
agagaaaccccuccagaacuccc

SEQ ID NO: 3693 - RNA, 29 nt, Homo Sapiens
agagaaaccccuccagaacucccacccug

SEQ ID NO: 3694 - RNA, 21 nt, Homo Sapiens
agaguaagccucuccccucca

SEQ ID NO: 3695 - RNA, 22 nt, Homo Sapiens
agacccaugugcuuccuugcuc

SEQ ID NO: 3696 - RNA, 22 nt, Homo Sapiens
agacauguccccguggcugugg

SEQ ID NO: 3697 - RNA, 20 nt, Homo Sapiens
ccagccaccacugaguccac

SEQ ID NO: 3698 - RNA, 21 nt, Homo Sapiens
cauuguccucugagcugcagu

SEQ ID NO: 3699 - RNA, 27 nt, Homo Sapiens
ccagcuguaguuaauuucagugccuua

SEQ ID NO: 3700 - RNA, 26 nt, Homo Sapiens
cccagccucagccugggacaccuagg

SEQ ID NO: 3701 - RNA, 20 nt, Homo Sapiens
cccacggaaagccucauuug

SEQ ID NO: 3702 - RNA, 30 nt, Homo Sapiens
cccacggaaagccucauuuguguggaaagu

SEQ ID NO: 3703 - RNA, 30 nt, Homo Sapiens
cccuacccauuuggccucuggagggggcag

SEQ ID NO: 3704 - RNA, 27 nt, Homo Sapiens
cccuccagagcccugaguuucuuggcu

SEQ ID NO: 3705 - RNA, 23 nt, Homo Sapiens
cccugacagcccaacaccaccuu

SEQ ID NO: 3706 - RNA, 27 nt, Homo Sapiens
cccugcaggccucaucuuucccaaaac

SEQ ID NO: 3707 - RNA, 24 nt, Homo Sapiens
cccuuccuccuucaugccugggcc

SEQ ID NO: 3708 - RNA, 24 nt, Homo Sapiens
caagaccucccuggaacccuucug

SEQ ID NO: 3709 - RNA, 26 nt, Homo Sapiens
caccccagccaccacugaguccacuc

SEQ ID NO: 3710 - RNA, 19 nt, Homo Sapiens
agggguggagaugggugug

SEQ ID NO: 3711 - RNA, 24 nt, Homo Sapiens
agggguggagauggguguggcagu

SEQ ID NO: 3712 - RNA, 21 nt, Homo Sapiens
aguaagccucuccccuccaga

SEQ ID NO: 3713 - RNA, 21 nt, Homo Sapiens
agugaagccuccaacccuaag

SEQ ID NO: 3714 - RNA, 23 nt, Homo Sapiens
gggguggagauggguguggcagu

SEQ ID NO: 3715 - RNA, 27 nt, Homo Sapiens
ggucaggcaucuucccuucacucaagc

SEQ ID NO: 3716 - RNA, 21 nt, Homo Sapiens
guccugccccuuccuccuuca

SEQ ID NO: 3717 - RNA, 26 nt, Homo Sapiens
gucauuguccucugagcugcaguuuc

SEQ ID NO: 3718 - RNA, 20 nt, Homo Sapiens
gugaagccuccaacccuaag

SEQ ID NO: 3719 - RNA, 23 nt, Homo Sapiens
gugagggcugggggcauccaggc

SEQ ID NO: 3720 - RNA, 21 nt, Homo Sapiens
gugggaaaguggaguccaccc

SEQ ID NO: 3721 - RNA, 17 nt, Homo Sapiens
guggaaagucagaggaa

SEQ ID NO: 3722 - RNA, 32 nt, Homo Sapiens
guggaaagucagaggaaaaaugauccagugga

SEQ ID NO: 3723 - RNA, 20 nt, Homo Sapiens
gcuccaguaaaaucuugccu

SEQ ID NO: 3724 - RNA, 24 nt, Homo Sapiens
ggaagcaucugucuugucauucca

SEQ ID NO: 3725 - RNA, 26 nt, Homo Sapiens
gcagcccaguggaauggaaagaaugu

SEQ ID NO: 3726 - RNA, 23 nt, Homo Sapiens
ccuuccuccuucaugccugggcc

SEQ ID NO: 3727 - RNA, 23 nt, Homo Sapiens
ccguccugccccuuccuccuuca

SEQ ID NO: 3728 - RNA, 21 nt, Homo Sapiens
cucauucuucuuggcucacca

SEQ ID NO: 3729 - RNA, 22 nt, Homo Sapiens
cgguggccagagaugccagcag

SEQ ID NO: 3730 - RNA, 22 nt, Homo Sapiens
cguccugccccuuccuccuuca

SEQ ID NO: 3731 - RNA, 24 nt, Homo Sapiens
cguccugccccuuccuccuucaug

SEQ ID NO: 3732 - RNA, 27 nt, Homo Sapiens
cugugugacucugggugagucccuuaa

SEQ ID NO: 3733 - RNA, 19 nt, Homo Sapiens
cuugucccagccucagccu

SEQ ID NO: 3734 - RNA, 22 nt, Homo Sapiens
cuucccuucacucaagcuuggc

SEQ ID NO: 3735 - RNA, 21 nt, Homo Sapiens
cugccaucgccuccaucagcc

SEQ ID NO: 3736 - RNA, 23 nt, Homo Sapiens
gaagcaucugucuugucauucca

SEQ ID NO: 3737 - RNA, 22 nt, Homo Sapiens
gaauuccuuggagccacuggga

SEQ ID NO: 3738 - RNA, 25 nt, Homo Sapiens
gacuucaagaugccucuucuaccuc

SEQ ID NO: 3739 - RNA, 20 nt, Homo Sapiens
cuggaggacguggacugggg

SEQ ID NO: 3740 - RNA, 20 nt, Homo Sapiens
cuucucccuagugcugguau

SEQ ID NO: 3741 - RNA, 26 nt, Homo Sapiens
cuagcacaucauggcagugggaccaa

SEQ ID NO: 3742 - RNA, 21 nt, Homo Sapiens
cucccucucugcaccugucuc

SEQ ID NO: 3743 - RNA, 20 nt, Homo Sapiens
cucugcaggacacagaucug

SEQ ID NO: 3744 - RNA, 22 nt, Homo Sapiens
cucuguccuggcugugcacauu

SEQ ID NO: 3745 - RNA, 23 nt, Homo Sapiens
ccucacgcucuccaucauaggcu

SEQ ID NO: 3746 - RNA, 19 nt, Homo Sapiens
ccucuucuaccucuuccag

SEQ ID NO: 3747 - RNA, 24 nt, Homo Sapiens
ccuuguucuuagagcagauucuag

SEQ ID NO: 3748 - RNA, 21 nt, Homo Sapiens
gcagccucuguccuggcugug

SEQ ID NO: 3749 - RNA, 22 nt, Homo Sapiens
gccaggcucucccucucugcac

SEQ ID NO: 3750 - RNA, 20 nt, Homo Sapiens
ggaggaugcugugccuccca

SEQ ID NO: 3751 - RNA, 22 nt, Homo Sapiens
gcucauucauauuccugccuuu

SEQ ID NO: 3752 - RNA, 23 nt, Homo Sapiens
gcucauucauauuccugccuuuc

SEQ ID NO: 3753 - RNA, 22 nt, Homo Sapiens
gcuguaagcaccugggcugagg

SEQ ID NO: 3754 - RNA, 21 nt, Homo Sapiens
guccuccuccuggaucuuuag

SEQ ID NO: 3755 - RNA, 22 nt, Homo Sapiens
ggucccggguuagccuggugac

SEQ ID NO: 3756 - RNA, 22 nt, Homo Sapiens
gggcugaggaggcaguuuuugu

SEQ ID NO: 3757 - RNA, 26 nt, Homo Sapiens
gggaagggaggucuccucuagacuga

SEQ ID NO: 3758 - RNA, 23 nt, Homo Sapiens
aggggggaaggggugggagccaa

SEQ ID NO: 3759 - RNA, 23 nt, Homo Sapiens
agugggaggagagggcagagguc

SEQ ID NO: 3760 - RNA, 28 nt, Homo Sapiens
agugggaggagagggcagagguccccug

SEQ ID NO: 3761 - RNA, 20 nt, Homo Sapiens
auauuccugccuuucuucca

SEQ ID NO: 3762 - RNA, 21 nt, Homo Sapiens
cacauugccuugagcuuuuca

SEQ ID NO: 3763 - RNA, 27 nt, Homo Sapiens
cacaggcaaagaggugcugcuuugcuu

SEQ ID NO: 3764 - RNA, 20 nt, Homo Sapiens
augccucuucuaccucuucc

SEQ ID NO: 3765 - RNA, 24 nt, Homo Sapiens
cccucacgcucuccaucauaggcu

SEQ ID NO: 3766 - RNA, 22 nt, Homo Sapiens
ccaggcucucccucucugcacc

SEQ ID NO: 3767 - RNA, 20 nt, Homo Sapiens
cagccucuguccuggcugug

SEQ ID NO: 3768 - RNA, 20 nt, Homo Sapiens
cagcaucuacuacucugucu

SEQ ID NO: 3769 - RNA, 22 nt, Homo Sapiens
agacuucuaggaggaugcugug

SEQ ID NO: 3770 - RNA, 23 nt, Homo Sapiens
acacccuacaaguugaucaugca

SEQ ID NO: 3771 - RNA, 24 nt, Homo Sapiens
acacccuacaaguugaucaugcag

SEQ ID NO: 3772 - RNA, 20 nt, Homo Sapiens
acauugccuugagcuuuuca

SEQ ID NO: 3773 - RNA, 18 nt, Homo Sapiens
aacugauuuuaaaugcaa

SEQ ID NO: 3774 - RNA, 19 nt, Homo Sapiens
uauuccugccuuucuucca

SEQ ID NO: 3775 - RNA, 21 nt, Homo Sapiens
guuagccuggugacaggcaga

SEQ ID NO: 3776 - RNA, 20 nt, Homo Sapiens
ucucccucucugcaccuguc

SEQ ID NO: 3777 - RNA, 24 nt, Homo Sapiens
ucucccucucugcaccugucucau

SEQ ID NO: 3778 - RNA, 23 nt, Homo Sapiens
ugcuucuucaauggcaccuucau

SEQ ID NO: 3779 - RNA, 23 nt, Homo Sapiens
ucuuccaggaagcacaggccagg

SEQ ID NO: 3780 - RNA, 18 nt, Homo Sapiens
ucugucuucacuauucag

SEQ ID NO: 3781 - RNA, 22 nt, Homo Sapiens
uucaguuaaguugcuguaagca

SEQ ID NO: 3782 - RNA, 23 nt, Homo Sapiens
uucauauuccugccuuucuucca

SEQ ID NO: 3783 - RNA, 26 nt, Homo Sapiens
uucauucuccguugucauugacuuca

SEQ ID NO: 3784 - RNA, 19 nt, Homo Sapiens
uuccucugcaggacacaga

SEQ ID NO: 3785 - RNA, 22 nt, Homo Sapiens
uugccuugagcuuuucaguuaa

SEQ ID NO: 3786 - RNA, 22 nt, Homo Sapiens
uugucucuuccucugcaggaca

SEQ ID NO: 3787 - RNA, 17 nt, Homo Sapiens
uguggagguggcugguc

SEQ ID NO: 3788 - RNA, 20 nt, Homo Sapiens
uguuguaggaaaagcuguuc

SEQ ID NO: 3789 - RNA, 22 nt, Homo Sapiens
ugcaugcuuuggaaauuuggaa

SEQ ID NO: 3790 - RNA, 22 nt, Homo Sapiens
ugcggaacucuuccuggaaugc

SEQ ID NO: 3791 - RNA, 20 nt, Homo Sapiens
ugcuuuggaaauuuggaaga

SEQ ID NO: 3792 - RNA, 24 nt, Homo Sapiens
ugcuuuggaaauuuggaagauggu

SEQ ID NO: 3793 - RNA, 25 nt, Homo Sapiens
uguacuuguucuuuucugguagguu

SEQ ID NO: 3794 - RNA, 24 nt, Homo Sapiens
guggugguuucuauacaugaauca

SEQ ID NO: 3795 - RNA, 23 nt, Homo Sapiens
uagguauuauauuuuggccuuac

SEQ ID NO: 3796 - RNA, 21 nt, Homo Sapiens
acaggaagccgccuagugcag

SEQ ID NO: 3797 - RNA, 22 nt, Homo Sapiens
acucuuugcaacagcacuugcu

SEQ ID NO: 3798 - RNA, 22 nt, Homo Sapiens
agcaguuucacugccaacuuuu

SEQ ID NO: 3799 - RNA, 23 nt, Homo Sapiens
aggacgcauuccaaaucauacuc

SEQ ID NO: 3800 - RNA, 25 nt, Homo Sapiens
aggaaagcguuuggaaaacguauca

SEQ ID NO: 3801 - RNA, 27 nt, Homo Sapiens
cccuuguucuaaugcugcacaccaguu

SEQ ID NO: 3802 - RNA, 22 nt, Homo Sapiens
augcagugccuuuccccauuca

SEQ ID NO: 3803 - RNA, 23 nt, Homo Sapiens
aucagugagcucaggagagagcu

SEQ ID NO: 3804 - RNA, 21 nt, Homo Sapiens
aucauacucacgggaggaauc

SEQ ID NO: 3805 - RNA, 23 nt, Homo Sapiens
gggagccgguuugggagagacca

SEQ ID NO: 3806 - RNA, 22 nt, Homo Sapiens
gggcggcggcgacuggagcuuc

SEQ ID NO: 3807 - RNA, 23 nt, Homo Sapiens
gggccaaucacugaguuuguggu

SEQ ID NO: 3808 - RNA, 22 nt, Homo Sapiens
gcuguucccaugucuaacagga

SEQ ID NO: 3809 - RNA, 27 nt, Homo Sapiens
gcuuuuaaacuggagaggcuaaccuca

SEQ ID NO: 3810 - RNA, 21 nt, Homo Sapiens
gcaguuucacugccaacuuuu

SEQ ID NO: 3811 - RNA, 21 nt, Homo Sapiens
gccugcaggggccacucucua

SEQ ID NO: 3812 - RNA, 21 nt, Homo Sapiens
gcggaacucuuccuggaaugc

SEQ ID NO: 3813 - RNA, 23 nt, Homo Sapiens
ccuguuucuaaguggccugcagg

SEQ ID NO: 3814 - RNA, 20 nt, Homo Sapiens
ccugcaggggccacucucua

SEQ ID NO: 3815 - RNA, 27 nt, Homo Sapiens
cuuuucugguagguucugucugugcca

SEQ ID NO: 3816 - RNA, 19 nt, Homo Sapiens
gcgggaaaagcacgugucc

SEQ ID NO: 3817 - RNA, 24 nt, Homo Sapiens
agaaggcaaggccgguguguuuau

SEQ ID NO: 3818 - RNA, 26 nt, Homo Sapiens
ugcagggcgaagagcaggcggcgagc

SEQ ID NO: 3819 - RNA, 21 nt, Homo Sapiens
ucuguaaccucccguugcguc

SEQ ID NO: 3820 - RNA, 22 nt, Homo Sapiens
ugucgcccaggcuggagugcag

SEQ ID NO: 3821 - RNA, 23 nt, Homo Sapiens
ugucgcccaggcuggagugcagu

SEQ ID NO: 3822 - RNA, 21 nt, Homo Sapiens
ucacugcaagcucuaccucuu

SEQ ID NO: 3823 - RNA, 23 nt, Homo Sapiens
uacagguugcugaaaagccagga

SEQ ID NO: 3824 - RNA, 22 nt, Homo Sapiens
ucucacccaggcaaucuugccu

SEQ ID NO: 3825 - RNA, 18 nt, Homo Sapiens
ucgcccaggcuggagugc

SEQ ID NO: 3826 - RNA, 21 nt, Homo Sapiens
ucgcccaggcuggagugcagu

SEQ ID NO: 3827 - RNA, 22 nt, Homo Sapiens
ucgcccaggcuggagugcagug

SEQ ID NO: 3828 - RNA, 23 nt, Homo Sapiens
uucaacacagagaaguugcugcu

SEQ ID NO: 3829 - RNA, 20 nt, Homo Sapiens
uuucucucacugucuauuua

SEQ ID NO: 3830 - RNA, 22 nt, Homo Sapiens
uuugucgcccaggcuggagugc

SEQ ID NO: 3831 - RNA, 26 nt, Homo Sapiens
uuugucgcccaggcuggagugcagug

SEQ ID NO: 3832 - RNA, 22 nt, Homo Sapiens
agccucccaaguagcugggacu

SEQ ID NO: 3833 - RNA, 22 nt, Homo Sapiens
agcucacugcaagcucuaccuc

SEQ ID NO: 3834 - RNA, 27 nt, Homo Sapiens
agcucacugcaagcucuaccucuuggu

SEQ ID NO: 3835 - RNA, 23 nt, Homo Sapiens
acgaucucagcucacugcaagcu

SEQ ID NO: 3836 - RNA, 22 nt, Homo Sapiens
aaccaagauuaugugacuugca

SEQ ID NO: 3837 - RNA, 22 nt, Homo Sapiens
aguggcacgaucucagcucacu

SEQ ID NO: 3838 - RNA, 23 nt, Homo Sapiens
aggcuggagugcaguggcacgau

SEQ ID NO: 3839 - RNA, 26 nt, Homo Sapiens
cccuccagccccguccgggagucccc

SEQ ID NO: 3840 - RNA, 19 nt, Homo Sapiens
cccaggcuggagugcagug

SEQ ID NO: 3841 - RNA, 20 nt, Homo Sapiens
cccaggcuggagugcagugg

SEQ ID NO: 3842 - RNA, 19 nt, Homo Sapiens
ccaggcuggagugcagugg

SEQ ID NO: 3843 - RNA, 26 nt, Homo Sapiens
ccagccgcccgcgcccuccagccccg

SEQ ID NO: 3844 - RNA, 24 nt, Homo Sapiens
ccagggaaagagaaaacucgcccu

SEQ ID NO: 3845 - RNA, 23 nt, Homo Sapiens
ccauucuccugccccagccuccc

SEQ ID NO: 3846 - RNA, 22 nt, Homo Sapiens
cccagccucccaaguagcuggg

SEQ ID NO: 3847 - RNA, 22 nt, Homo Sapiens
cccaaguagcugggacuacagg

SEQ ID NO: 3848 - RNA, 22 nt, Homo Sapiens
caggcuggagugcaguggcacg

SEQ ID NO: 3849 - RNA, 27 nt, Homo Sapiens
caggcuggagugcaguggcacgaucuc

SEQ ID NO: 3850 - RNA, 22 nt, Homo Sapiens
ccaaguagcugggacuacaggu

SEQ ID NO: 3851 - RNA, 22 nt, Homo Sapiens
gcccaggcuggagugcaguggc

SEQ ID NO: 3852 - RNA, 25 nt, Homo Sapiens
gcccaggcuggagugcaguggcacg

SEQ ID NO: 3853 - RNA, 20 nt, Homo Sapiens
gcacggcaaccgcgaggccu

SEQ ID NO: 3854 - RNA, 19 nt, Homo Sapiens
gcccaggcuggagugcagu

SEQ ID NO: 3855 - RNA, 21 nt, Homo Sapiens
ggagaggggagcagagccgga

SEQ ID NO: 3856 - RNA, 27 nt, Homo Sapiens
ggagaggggagcagagccggaguuggg

SEQ ID NO: 3857 - RNA, 16 nt, Homo Sapiens
gcugcuugugaucuca

SEQ ID NO: 3858 - RNA, 21 nt, Homo Sapiens
gcucacugcaagcucuaccuc

SEQ ID NO: 3859 - RNA, 22 nt, Homo Sapiens
gcucacugcaagcucuaccucu

SEQ ID NO: 3860 - RNA, 27 nt, Homo Sapiens
gcucacugcaagcucuaccucuugguu

SEQ ID NO: 3861 - RNA, 32 nt, Homo Sapiens
gcucacugcaagcucuaccucuugguucacgc

SEQ ID NO: 3862 - RNA, 22 nt, Homo Sapiens
gucgcccaggcuggagugcagu

SEQ ID NO: 3863 - RNA, 23 nt, Homo Sapiens
gucgcccaggcuggagugcagug

SEQ ID NO: 3864 - RNA, 21 nt, Homo Sapiens
cuuucucucacugucuauuua

SEQ ID NO: 3865 - RNA, 20 nt, Homo Sapiens
ccuucugguuucuuccagcc

SEQ ID NO: 3866 - RNA, 26 nt, Homo Sapiens
cugaaaacugugucuuccuggagacu

SEQ ID NO: 3867 - RNA, 26 nt, Homo Sapiens
cucacacacagauuuuuauguuuucu

SEQ ID NO: 3868 - RNA, 20 nt, Homo Sapiens
cgcccaggcuggagugcagu

SEQ ID NO: 3869 - RNA, 21 nt, Homo Sapiens
cgcccaggcuggagugcagug

SEQ ID NO: 3870 - RNA, 22 nt, Homo Sapiens
cgcccaggcuggagugcagugg

SEQ ID NO: 3871 - RNA, 22 nt, Homo Sapiens
cgccccggagggaggccgaggg

SEQ ID NO: 3872 - RNA, 19 nt, Homo Sapiens
cuugcagaaucaccacacg

SEQ ID NO: 3873 - RNA, 20 nt, Homo Sapiens
cugagcugcugguucacucu

SEQ ID NO: 3874 - RNA, 26 nt, Homo Sapiens
cugagcugcugguucacucuucagca

SEQ ID NO: 3875 - RNA, 25 nt, Homo Sapiens
gucauuuggcaaaggagaugacuua

SEQ ID NO: 3876 - RNA, 24 nt, Homo Sapiens
ggguaaaagcccacccuacagaaa

SEQ ID NO: 3877 - RNA, 22 nt, Homo Sapiens
gggcugagaagauccugaguac

SEQ ID NO: 3878 - RNA, 22 nt, Homo Sapiens
gggagagaagggcagcagcuua

SEQ ID NO: 3879 - RNA, 20 nt, Homo Sapiens
gcuggcuuuggaaugagguu

SEQ ID NO: 3880 - RNA, 19 nt, Homo Sapiens
gcuguuguaaaaugccuuc

SEQ ID NO: 3881 - RNA, 19 nt, Homo Sapiens
gcagacagaccaggaacac

SEQ ID NO: 3882 - RNA, 20 nt, Homo Sapiens
gcaguuucccacuugccaaa

SEQ ID NO: 3883 - RNA, 26 nt, Homo Sapiens
gcaguuucccacuugccaaagauccc

SEQ ID NO: 3884 - RNA, 28 nt, Homo Sapiens
gcccggaccugaugugaaaggaccacgg

SEQ ID NO: 3885 - RNA, 18 nt, Homo Sapiens
gcccuucaucagccuggg

SEQ ID NO: 3886 - RNA, 27 nt, Homo Sapiens
caugcucuguggccuucuuacacuucu

SEQ ID NO: 3887 - RNA, 26 nt, Homo Sapiens
caguguccguguuaauguauuuggcu

SEQ ID NO: 3888 - RNA, 24 nt, Homo Sapiens
ccagcccuucaucagccugggcag

SEQ ID NO: 3889 - RNA, 27 nt, Homo Sapiens
ccccagccaacuucaugggucacuuuu

SEQ ID NO: 3890 - RNA, 21 nt, Homo Sapiens
agggcagcagcuuauuggugg

SEQ ID NO: 3891 - RNA, 23 nt, Homo Sapiens
caaagcccuccagccuguuugug

SEQ ID NO: 3892 - RNA, 24 nt, Homo Sapiens
caaagcccuccagccuguuugugg

SEQ ID NO: 3893 - RNA, 17 nt, Homo Sapiens
auuggcagaaacaguga

SEQ ID NO: 3894 - RNA, 24 nt, Homo Sapiens
aagugaucucagaggggcccaugg

SEQ ID NO: 3895 - RNA, 24 nt, Homo Sapiens
aaugguugggggagagaagggcag

SEQ ID NO: 3896 - RNA, 17 nt, Homo Sapiens
agaaauucugcaguggc

SEQ ID NO: 3897 - RNA, 21 nt, Homo Sapiens
agcaguuucccacuugccaaa

SEQ ID NO: 3898 - RNA, 22 nt, Homo Sapiens
agcaguuucccacuugccaaag

SEQ ID NO: 3899 - RNA, 27 nt, Homo Sapiens
agcaguuucccacuugccaaagauccc

SEQ ID NO: 3900 - RNA, 22 nt, Homo Sapiens
uuuucucaaauccuggagagag

SEQ ID NO: 3901 - RNA, 23 nt, Homo Sapiens
uguguaguguggucugggcaggc

SEQ ID NO: 3902 - RNA, 25 nt, Homo Sapiens
uucacucuucagcauuuaugaaaca

SEQ ID NO: 3903 - RNA, 23 nt, Homo Sapiens
uccuagacuggacucuugaggga

SEQ ID NO: 3904 - RNA, 22 nt, Homo Sapiens
ucaucccaagguccgucccaug

SEQ ID NO: 3905 - RNA, 21 nt, Homo Sapiens
guugggggagagaagggcagc

SEQ ID NO: 3906 - RNA, 28 nt, Homo Sapiens
uguaguguggucugggcaggcagaccuu

SEQ ID NO: 3907 - RNA, 21 nt, Homo Sapiens
ugggggagagaagggcagcag

SEQ ID NO: 3908 - RNA, 24 nt, Homo Sapiens
ugguugucauuuggcaaaggagau

SEQ ID NO: 3909 - RNA, 23 nt, Homo Sapiens
ugccuucagaaauaaguccuaga

SEQ ID NO: 3910 - RNA, 21 nt, Homo Sapiens
ugagccaggccugggucugug

SEQ ID NO: 3911 - RNA, 22 nt, Homo Sapiens
ucugacauuaacaguuuuccau

SEQ ID NO: 3912 - RNA, 23 nt, Homo Sapiens
ugcuucacagcgcccaccugucu

SEQ ID NO: 3913 - RNA, 24 nt, Homo Sapiens
gugucucuuuucucuuucuccuua

SEQ ID NO: 3914 - RNA, 20 nt, Homo Sapiens
uaucugugcgugaaacacac

SEQ ID NO: 3915 - RNA, 23 nt, Homo Sapiens
uuccuggcaauaguguguucuga

SEQ ID NO: 3916 - RNA, 27 nt, Homo Sapiens
uguucugacauuaacaguuuuccauga

SEQ ID NO: 3917 - RNA, 24 nt, Homo Sapiens
agcagugaccgugcuccuacccag

SEQ ID NO: 3918 - RNA, 27 nt, Homo Sapiens
aggcagccggcacccacaagugccacu

SEQ ID NO: 3919 - RNA, 27 nt, Homo Sapiens
acacuucagagagcugguaguuaguag

SEQ ID NO: 3920 - RNA, 22 nt, Homo Sapiens
auuuaagcauuguuugcuuauu

SEQ ID NO: 3921 - RNA, 23 nt, Homo Sapiens
cacaccaggcugugggccucaag

SEQ ID NO: 3922 - RNA, 23 nt, Homo Sapiens
caauguucauuguaauguuacug

SEQ ID NO: 3923 - RNA, 23 nt, Homo Sapiens
aggguuccuguagaccuagggag

SEQ ID NO: 3924 - RNA, 21 nt, Homo Sapiens
caggccugggucugugucucu

SEQ ID NO: 3925 - RNA, 22 nt, Homo Sapiens
gcccgagcuggugcauuacaga

SEQ ID NO: 3926 - RNA, 24 nt, Homo Sapiens
ggucugugucucuuuucucuuucu

SEQ ID NO: 3927 - RNA, 21 nt, Homo Sapiens
cuuuucucuuucuccuuaguc

SEQ ID NO: 3928 - RNA, 26 nt, Homo Sapiens
gagaaacacaucuucccuagaggguu

SEQ ID NO: 3929 - RNA, 22 nt, Homo Sapiens
gaauguucugacauuaacaguu

SEQ ID NO: 3930 - RNA, 23 nt, Homo Sapiens
gaguguguauuguucccagugac

SEQ ID NO: 3931 - RNA, 22 nt, Homo Sapiens
ccggcacccacaagugccacug

SEQ ID NO: 3932 - RNA, 23 nt, Homo Sapiens
ccuacccuaaugccaguuccagc

SEQ ID NO: 3933 - RNA, 21 nt, Homo Sapiens
ccucuaucacgaagauauuga

SEQ ID NO: 3934 - RNA, 25 nt, Homo Sapiens
gacacaaaauauuggaagaguggca

SEQ ID NO: 3935 - RNA, 23 nt, Homo Sapiens
ggcucuggcugugcauucagcag

SEQ ID NO: 3936 - RNA, 22 nt, Homo Sapiens
gcacccacugcauuugcagccu

SEQ ID NO: 3937 - RNA, 19 nt, Homo Sapiens
gcauuuucuacauguauua

SEQ ID NO: 3938 - RNA, 21 nt, Homo Sapiens
cauuccugccugacaggacca

SEQ ID NO: 3939 - RNA, 22 nt, Homo Sapiens
ccagagagaggccaaggcugau

SEQ ID NO: 3940 - RNA, 22 nt, Homo Sapiens
ccacugcauuugcagccuugag

SEQ ID NO: 3941 - RNA, 27 nt, Homo Sapiens
ccacugcauuugcagccuugaggucau

SEQ ID NO: 3942 - RNA, 24 nt, Homo Sapiens
cccacugcauuugcagccuugagg

SEQ ID NO: 3943 - RNA, 24 nt, Homo Sapiens
cacagguuguagagauagagaugg

SEQ ID NO: 3944 - RNA, 25 nt, Homo Sapiens
auggauuugcacccacugcauuugc

SEQ ID NO: 3945 - RNA, 22 nt, Homo Sapiens
acacuccuaaauuuagagucaa

SEQ ID NO: 3946 - RNA, 23 nt, Homo Sapiens
aauaaaccacacuuaguccugau

SEQ ID NO: 3947 - RNA, 24 nt, Homo Sapiens
agagguggggaacaaguaaaagcu

SEQ ID NO: 3948 - RNA, 20 nt, Homo Sapiens
uugcauuuuaucaaaugcau

SEQ ID NO: 3949 - RNA, 25 nt, Homo Sapiens
uuugcacccacugcauuugcagccu

SEQ ID NO: 3950 - RNA, 24 nt, Homo Sapiens
uagguuuuuuauagcuauuaaaaa

SEQ ID NO: 3951 - RNA, 21 nt, Homo Sapiens
uaaugccaguuccagcuucau

SEQ ID NO: 3952 - RNA, 28 nt, Homo Sapiens
guuauaucagacuggagcaccagagaga

SEQ ID NO: 3953 - RNA, 23 nt, Homo Sapiens
uggugagagaaagugaaaugaaa

SEQ ID NO: 3954 - RNA, 18 nt, Homo Sapiens
ucucugaaaaggaauuga

SEQ ID NO: 3955 - RNA, 23 nt, Homo Sapiens
ugcacccacugcauuugcagccu

SEQ ID NO: 3956 - RNA, 21 nt, Homo Sapiens
uguuugucugugugcuguaac

SEQ ID NO: 3957 - RNA, 22 nt, Homo Sapiens
agccuccugggcauguuugucu

SEQ ID NO: 3958 - RNA, 18 nt, Homo Sapiens
ccuguucucuuugccuug

SEQ ID NO: 3959 - RNA, 26 nt, Homo Sapiens
cuccugggcauguuugucugugugcu

SEQ ID NO: 3960 - RNA, 19 nt, Homo Sapiens
cuccgccucugcuggcaca

SEQ ID NO: 3961 - RNA, 24 nt, Homo Sapiens
cuccgccucugcuggcacauuucc

SEQ ID NO: 3962 - RNA, 23 nt, Homo Sapiens
cucuuccuugcugugucauacca

SEQ ID NO: 3963 - RNA, 19 nt, Homo Sapiens
cguccugccaccuggggca

SEQ ID NO: 3964 - RNA, 23 nt, Homo Sapiens
ccuguguagcugggauuauagau

SEQ ID NO: 3965 - RNA, 27 nt, Homo Sapiens
ccuguguagcugggauuauagauugga

SEQ ID NO: 3966 - RNA, 28 nt, Homo Sapiens
ccugcugcugcugcugcugcuaaucuuc

SEQ ID NO: 3967 - RNA, 26 nt, Homo Sapiens
ccuugaacuccugggcucaagcaguc

SEQ ID NO: 3968 - RNA, 22 nt, Homo Sapiens
ccuuugaguuuccucaggcugc

SEQ ID NO: 3969 - RNA, 27 nt, Homo Sapiens
ccuuugaguuuccucaggcugcuggag

SEQ ID NO: 3970 - RNA, 25 nt, Homo Sapiens
ccuccugccaccugcugcugcugcu

SEQ ID NO: 3971 - RNA, 18 nt, Homo Sapiens
ccugccaccugcugcugc

SEQ ID NO: 3972 - RNA, 27 nt, Homo Sapiens
ccuaggcugaccuugaacuccugggcu

SEQ ID NO: 3973 - RNA, 22 nt, Homo Sapiens
gaacuccugggcucaagcaguc

SEQ ID NO: 3974 - RNA, 23 nt, Homo Sapiens
cugugggcaggugggagcuugau

SEQ ID NO: 3975 - RNA, 21 nt, Homo Sapiens
cugccaccugcugcugcugcu

SEQ ID NO: 3976 - RNA, 22 nt, Homo Sapiens
cugccaccugcugcugcugcug

SEQ ID NO: 3977 - RNA, 22 nt, Homo Sapiens
cugcuccccucccuccucuguc

SEQ ID NO: 3978 - RNA, 21 nt, Homo Sapiens
cugcugcugcugcuaaucuuc

SEQ ID NO: 3979 - RNA, 24 nt, Homo Sapiens
cugcugcugcugcugcuaaucuuc

SEQ ID NO: 3980 - RNA, 26 nt, Homo Sapiens
gccacugccacacgucugacccucuc

SEQ ID NO: 3981 - RNA, 25 nt, Homo Sapiens
gcugggagggauagaggggggcugc

SEQ ID NO: 3982 - RNA, 25 nt, Homo Sapiens
gcugcugcugcugcugcuaaucuuc

SEQ ID NO: 3983 - RNA, 20 nt, Homo Sapiens
gcugccuggcccccagcugu

SEQ ID NO: 3984 - RNA, 21 nt, Homo Sapiens
gcugaccuugaacuccugggc

SEQ ID NO: 3985 - RNA, 23 nt, Homo Sapiens
gcugaccuugaacuccugggcuc

SEQ ID NO: 3986 - RNA, 27 nt, Homo Sapiens
ggagagggaugaggugcugggagggau

SEQ ID NO: 3987 - RNA, 24 nt, Homo Sapiens
gcuuugacugagcagacuggugag

SEQ ID NO: 3988 - RNA, 21 nt, Homo Sapiens
gcuugauucucagcacuuggg

SEQ ID NO: 3989 - RNA, 25 nt, Homo Sapiens
gcuugauucucagcacuugggggau

SEQ ID NO: 3990 - RNA, 22 nt, Homo Sapiens
gcuugcguuagaaugaggagga

SEQ ID NO: 3991 - RNA, 26 nt, Homo Sapiens
ggagagaaaggggauguauccauggg

SEQ ID NO: 3992 - RNA, 24 nt, Homo Sapiens
ggcugaccuugaacuccugggcuc

SEQ ID NO: 3993 - RNA, 26 nt, Homo Sapiens
ggcugcuggaggaaaacugagacuca

SEQ ID NO: 3994 - RNA, 22 nt, Homo Sapiens
gggagcuugauucucagcacuu

SEQ ID NO: 3995 - RNA, 21 nt, Homo Sapiens
ggggcagucaccugcccagau

SEQ ID NO: 3996 - RNA, 23 nt, Homo Sapiens
ggggcagucuggaggggcauggc

SEQ ID NO: 3997 - RNA, 27 nt, Homo Sapiens
gggggaucuguuguguacguggagagg

SEQ ID NO: 3998 - RNA, 27 nt, Homo Sapiens
guaaaacugaggcacgagcaaagugaa

SEQ ID NO: 3999 - RNA, 22 nt, Homo Sapiens
agccuccuguguagcugggauu

SEQ ID NO: 4000 - RNA, 21 nt, Homo Sapiens
aggaaaacugagacucagaca

SEQ ID NO: 4001 - RNA, 18 nt, Homo Sapiens
agaccugagcuccccacc

SEQ ID NO: 4002 - RNA, 20 nt, Homo Sapiens
acgcugguagagauggagga

SEQ ID NO: 4003 - RNA, 22 nt, Homo Sapiens
acccaccucagccuccugugua

SEQ ID NO: 4004 - RNA, 22 nt, Homo Sapiens
acccugaucagucuaagauggg

SEQ ID NO: 4005 - RNA, 21 nt, Homo Sapiens
acugggagggcccacuucagg

SEQ ID NO: 4006 - RNA, 20 nt, Homo Sapiens
agggcacugcugcugccuuu

SEQ ID NO: 4007 - RNA, 27 nt, Homo Sapiens
augacuuugucccauuucuaaaggccu

SEQ ID NO: 4008 - RNA, 20 nt, Homo Sapiens
ccagggaugccaucuguggg

SEQ ID NO: 4009 - RNA, 19 nt, Homo Sapiens
cccucccuccucugucccu

SEQ ID NO: 4010 - RNA, 24 nt, Homo Sapiens
cccucccuccucugucccuagguc

SEQ ID NO: 4011 - RNA, 24 nt, Homo Sapiens
caggcugcuggaggaaaacugaga

SEQ ID NO: 4012 - RNA, 21 nt, Homo Sapiens
caguccaccugagcugccauc

SEQ ID NO: 4013 - RNA, 22 nt, Homo Sapiens
uucuccucuccccucuaaggcc

SEQ ID NO: 4014 - RNA, 21 nt, Homo Sapiens
ugccaccugcugcugcugcug

SEQ ID NO: 4015 - RNA, 22 nt, Homo Sapiens
ugaacuccugggcucaagcagu

SEQ ID NO: 4016 - RNA, 20 nt, Homo Sapiens
uggagccaccaugcccagcu

SEQ ID NO: 4017 - RNA, 19 nt, Homo Sapiens
uagagauggaggaggaggc

SEQ ID NO: 4018 - RNA, 23 nt, Homo Sapiens
ucagcacuugggggaucuguugu

SEQ ID NO: 4019 - RNA, 19 nt, Homo Sapiens
uccucuugaagaugcugaa

SEQ ID NO: 4020 - RNA, 21 nt, Homo Sapiens
ucuccucuccccucuaaggcc

SEQ ID NO: 4021 - RNA, 25 nt, Homo Sapiens
uccacgaagaaagcaacgaaugaaa

SEQ ID NO: 4022 - RNA, 20 nt, Homo Sapiens
uaacccaccaaccugccugu

SEQ ID NO: 4023 - RNA, 21 nt, Homo Sapiens
uggagaaggugggcacuggau

SEQ ID NO: 4024 - RNA, 21 nt, Homo Sapiens
ugcuuguuugcuucaacuguc

SEQ ID NO: 4025 - RNA, 19 nt, Homo Sapiens
uguccccuucuccaucgcc

SEQ ID NO: 4026 - RNA, 20 nt, Homo Sapiens
ucuggagaaggugggcacug

SEQ ID NO: 4027 - RNA, 22 nt, Homo Sapiens
uucauuucaucuaccauuuucu

SEQ ID NO: 4028 - RNA, 23 nt, Homo Sapiens
uuccauuuaauggggugcaccug

SEQ ID NO: 4029 - RNA, 20 nt, Homo Sapiens
uucccccucucccaguuguc

SEQ ID NO: 4030 - RNA, 20 nt, Homo Sapiens
uguguaacugcccaaagcag

SEQ ID NO: 4031 - RNA, 24 nt, Homo Sapiens
uuaauuucuucacaccuacccucc

SEQ ID NO: 4032 - RNA, 22 nt, Homo Sapiens
caguuaaucuugcuuucuuugu

SEQ ID NO: 4033 - RNA, 27 nt, Homo Sapiens
caguuaaucuugcuuucuuuguuuggc

SEQ ID NO: 4034 - RNA, 23 nt, Homo Sapiens
auaauaaggaauaaaccccaccu

SEQ ID NO: 4035 - RNA, 22 nt, Homo Sapiens
auccaggucacggggcaccaaa

SEQ ID NO: 4036 - RNA, 20 nt, Homo Sapiens
auaguauuuuuauauuuaaa

SEQ ID NO: 4037 - RNA, 22 nt, Homo Sapiens
aauuuuguaucuugaugucuuu

SEQ ID NO: 4038 - RNA, 20 nt, Homo Sapiens
agaccugacguacucugguu

SEQ ID NO: 4039 - RNA, 24 nt, Homo Sapiens
agaccuuaacccaccaaccugccu

SEQ ID NO: 4040 - RNA, 28 nt, Homo Sapiens
agcaguacugcggccuccucuccucucc

SEQ ID NO: 4041 - RNA, 20 nt, Homo Sapiens
aggccagcugugguuuucuu

SEQ ID NO: 4042 - RNA, 22 nt, Homo Sapiens
aacacuuguaauuuuguaucuu

SEQ ID NO: 4043 - RNA, 24 nt, Homo Sapiens
aaagaagaaaagguucuuacugcu

SEQ ID NO: 4044 - RNA, 26 nt, Homo Sapiens
aaagaagaaaagguucuuacugcuug

SEQ ID NO: 4045 - RNA, 21 nt, Homo Sapiens
ggggugcaccuguccaauagg

SEQ ID NO: 4046 - RNA, 18 nt, Homo Sapiens
guccccuucuccaucgcc

SEQ ID NO: 4047 - RNA, 20 nt, Homo Sapiens
gggaacaccuuccaccauga

SEQ ID NO: 4048 - RNA, 23 nt, Homo Sapiens
ggccuccucuccucuccuaaccu

SEQ ID NO: 4049 - RNA, 20 nt, Homo Sapiens
ggagagaagguagggguugg

SEQ ID NO: 4050 - RNA, 21 nt, Homo Sapiens
gccuacucugugaacuccggg

SEQ ID NO: 4051 - RNA, 21 nt, Homo Sapiens
gcgaccagcggggauccuccc

SEQ ID NO: 4052 - RNA, 27 nt, Homo Sapiens
cuguggcaggccagcugugguuuucuu

SEQ ID NO: 4053 - RNA, 21 nt, Homo Sapiens
cuucccccucucccaguuguc

SEQ ID NO: 4054 - RNA, 21 nt, Homo Sapiens
gaaagcuccggugcuuggacc

SEQ ID NO: 4055 - RNA, 25 nt, Homo Sapiens
gaggagauggggacagggcuggagu

SEQ ID NO: 4056 - RNA, 21 nt, Homo Sapiens
ccuaccucugcucuuggagga

SEQ ID NO: 4057 - RNA, 23 nt, Homo Sapiens
cucugcucuuggaggagaugggg

SEQ ID NO: 4058 - RNA, 21 nt, Homo Sapiens
cuccuaguucuucaucccacu

SEQ ID NO: 4059 - RNA, 16 nt, Homo Sapiens
aagagagugaucaugu

SEQ ID NO: 4060 - RNA, 23 nt, Homo Sapiens
uucuucugugggagaacuuaaug

SEQ ID NO: 4061 - RNA, 20 nt, Homo Sapiens
ugucaguguuugggaaauua

SEQ ID NO: 4062 - RNA, 21 nt, Homo Sapiens
gaguccuugcaaaauugucua

SEQ ID NO: 4063 - RNA, 17 nt, Homo Sapiens
gacuauacagugucacu

SEQ ID NO: 4064 - RNA, 28 nt, Homo Sapiens
ccggacaugcaggugaauauuuuaauag

SEQ ID NO: 4065 - RNA, 24 nt, Homo Sapiens
gcauggcacugacaucugccuugu

SEQ ID NO: 4066 - RNA, 24 nt, Homo Sapiens
ggaggcugggaaggcgaagggcau

SEQ ID NO: 4067 - RNA, 22 nt, Homo Sapiens
ggagaaggaaaaagaacuuacg

SEQ ID NO: 4068 - RNA, 20 nt, Homo Sapiens
gugaaaaauuaacaugugga

SEQ ID NO: 4069 - RNA, 32 nt, Homo Sapiens
aagucaaagacaggaagagaucagagugaaug

SEQ ID NO: 4070 - RNA, 22 nt, Homo Sapiens
aaagaaauuuauuuucuuccua

SEQ ID NO: 4071 - RNA, 21 nt, Homo Sapiens
agaauggaguccucaugaccu

SEQ ID NO: 4072 - RNA, 21 nt, Homo Sapiens
acuucuauauaugaaugucuu

SEQ ID NO: 4073 - RNA, 20 nt, Homo Sapiens
acacacacauuuaucauuua

SEQ ID NO: 4074 - RNA, 22 nt, Homo Sapiens
acacauuuaucauuuaaugcau

SEQ ID NO: 4075 - RNA, 20 nt, Homo Sapiens
aauucuuuaaucuguccagu

SEQ ID NO: 4076 - RNA, 21 nt, Homo Sapiens
acucacugaagcuucgauuuc

SEQ ID NO: 4077 - RNA, 25 nt, Homo Sapiens
agugucacucauuuguaguaaaacu

SEQ ID NO: 4078 - RNA, 21 nt, Homo Sapiens
aucccggagaaggaaaaagaa

SEQ ID NO: 4079 - RNA, 23 nt, Homo Sapiens
agggcauggcacugacaucugcc

SEQ ID NO: 4080 - RNA, 31 nt, Homo Sapiens
agggcauggcacugacaucugccuuguaacu

SEQ ID NO: 4081 - RNA, 22 nt, Homo Sapiens
cacucacugaagcuucgauuuc

SEQ ID NO: 4082 - RNA, 21 nt, Homo Sapiens
cagucccaguuucucuuauua

SEQ ID NO: 4083 - RNA, 27 nt, Homo Sapiens
caguagaacuaugucggagcacucacu

SEQ ID NO: 4084 - RNA, 18 nt, Homo Sapiens
ugcuaaaguaauuuacaa

SEQ ID NO: 4085 - RNA, 21 nt, Homo Sapiens
ugaagcuucgauuucccacug

SEQ ID NO: 4086 - RNA, 22 nt, Homo Sapiens
ucuuugguaguuuuuugcacua

SEQ ID NO: 4087 - RNA, 26 nt, Homo Sapiens
ugauuacuauauuuuguucacacuaa

SEQ ID NO: 4088 - RNA, 25 nt, Homo Sapiens
uauuaauaaaacuuuggaaauugcu

SEQ ID NO: 4089 - RNA, 20 nt, Homo Sapiens
ucccggagaaggaaaaagaa

SEQ ID NO: 4090 - RNA, 22 nt, Homo Sapiens
ucaugaucucaggauguaugga

SEQ ID NO: 4091 - RNA, 26 nt, Homo Sapiens
uccaauaaauuauauaccugccuaag

SEQ ID NO: 4092 - RNA, 32 nt, Homo Sapiens
uccuaucauucauuccuucauucugaacaggc

SEQ ID NO: 4093 - RNA, 22 nt, Homo Sapiens
uucaccaaaccaaauguggaaa

SEQ ID NO: 4094 - RNA, 22 nt, Homo Sapiens
uguuuuuuaaaaguaauuuuua

SEQ ID NO: 4095 - RNA, 22 nt, Homo Sapiens
ucugcccuuccuuucccugggg

SEQ ID NO: 4096 - RNA, 22 nt, Homo Sapiens
agcuugggaggaagcccaguag

SEQ ID NO: 4097 - RNA, 21 nt, Homo Sapiens
ggggccauucguaugcagccu

SEQ ID NO: 4098 - RNA, 22 nt, Homo Sapiens
gggggagcugaaagggagcccc

SEQ ID NO: 4099 - RNA, 27 nt, Homo Sapiens
gggggagcugaaagggagccccugcuc

SEQ ID NO: 4100 - RNA, 20 nt, Homo Sapiens
ggggcagcaggagcgguaga

SEQ ID NO: 4101 - RNA, 19 nt, Homo Sapiens
gggcagcaggagcgguaga

SEQ ID NO: 4102 - RNA, 27 nt, Homo Sapiens
ggcuggcuguuggccccucugcugucc

SEQ ID NO: 4103 - RNA, 26 nt, Homo Sapiens
gggagagacugugaggcggcagcugg

SEQ ID NO: 4104 - RNA, 22 nt, Homo Sapiens
ggcucugcuuccucagcccuag

SEQ ID NO: 4105 - RNA, 23 nt, Homo Sapiens
ggcgacugucauguggcuugguu

SEQ ID NO: 4106 - RNA, 25 nt, Homo Sapiens
ggcuccuguuucucauccuagcuuu

SEQ ID NO: 4107 - RNA, 25 nt, Homo Sapiens
ggccucccacuccuguuccuugcua

SEQ ID NO: 4108 - RNA, 25 nt, Homo Sapiens
ggccaggguagacuuggagcugucc

SEQ ID NO: 4109 - RNA, 19 nt, Homo Sapiens
ggagugagaagaaggaaga

SEQ ID NO: 4110 - RNA, 21 nt, Homo Sapiens
ggcagggagugucugcagucc

SEQ ID NO: 4111 - RNA, 27 nt, Homo Sapiens
gugagcaggcuuugggaacacuggccu

SEQ ID NO: 4112 - RNA, 22 nt, Homo Sapiens
guggcggggcagcaggagcggu

SEQ ID NO: 4113 - RNA, 19 nt, Homo Sapiens
guccacccucauuucugcc

SEQ ID NO: 4114 - RNA, 27 nt, Homo Sapiens
gucagagggacugucagcugagcuuga

SEQ ID NO: 4115 - RNA, 20 nt, Homo Sapiens
gucuuccucuuguuuacgac

SEQ ID NO: 4116 - RNA, 28 nt, Homo Sapiens
ggguagaauuguuuggcaaugcacugaa

SEQ ID NO: 4117 - RNA, 30 nt, Homo Sapiens
ggguagaauuguuuggcaaugcacugaagc

SEQ ID NO: 4118 - RNA, 29 nt, Homo Sapiens
gguuguugccagguugcagcugcucuugc

SEQ ID NO: 4119 - RNA, 26 nt, Homo Sapiens
gguggguggagucaggcuucucuugc

SEQ ID NO: 4120 - RNA, 23 nt, Homo Sapiens
ggagcucgggacggauaguagac

SEQ ID NO: 4121 - RNA, 24 nt, Homo Sapiens
gcugacaucuugcacggugacccc

SEQ ID NO: 4122 - RNA, 26 nt, Homo Sapiens
gcucuuuguggcaguggccaggcagg

SEQ ID NO: 4123 - RNA, 21 nt, Homo Sapiens
gcuggauuugggagcucugcu

SEQ ID NO: 4124 - RNA, 25 nt, Homo Sapiens
gccagcccucccuggcugugagcag

SEQ ID NO: 4125 - RNA, 18 nt, Homo Sapiens
gcagguggccacagcagg

SEQ ID NO: 4126 - RNA, 24 nt, Homo Sapiens
gcgcucaacugcagccccuccucc

SEQ ID NO: 4127 - RNA, 22 nt, Homo Sapiens
ccuaugggcuuccgcacaugcc

SEQ ID NO: 4128 - RNA, 22 nt, Homo Sapiens
ccguugcgggguggagugaggu

SEQ ID NO: 4129 - RNA, 23 nt, Homo Sapiens
ccuccugggaaggagggagcugc

SEQ ID NO: 4130 - RNA, 26 nt, Homo Sapiens
ccuucccagcagacauccucaucggg

SEQ ID NO: 4131 - RNA, 21 nt, Homo Sapiens
ccugggaaggagggagcugcu

SEQ ID NO: 4132 - RNA, 23 nt, Homo Sapiens
cuccuguuucucauccuagcuuu

SEQ ID NO: 4133 - RNA, 20 nt, Homo Sapiens
cucccuucucucuuuucuuc

SEQ ID NO: 4134 - RNA, 24 nt, Homo Sapiens
cgccuuccccucaguuguuucuaa

SEQ ID NO: 4135 - RNA, 22 nt, Homo Sapiens
cgguucuuccuggaaguugacu

SEQ ID NO: 4136 - RNA, 20 nt, Homo Sapiens
gaacccccuccagacaccca

SEQ ID NO: 4137 - RNA, 28 nt, Homo Sapiens
gacagcagccucccugucacucagcuga

SEQ ID NO: 4138 - RNA, 21 nt, Homo Sapiens
gcaccauucucccuucucucu

SEQ ID NO: 4139 - RNA, 24 nt, Homo Sapiens
gagcagccuccacuguguccagag

SEQ ID NO: 4140 - RNA, 24 nt, Homo Sapiens
gaucguggccaacguggaccugcc

SEQ ID NO: 4141 - RNA, 21 nt, Homo Sapiens
gagugucacugagcuguguuu

SEQ ID NO: 4142 - RNA, 21 nt, Homo Sapiens
cuuggagcuguccuccagagg

SEQ ID NO: 4143 - RNA, 21 nt, Homo Sapiens
agcuggggagcagcugagaug

SEQ ID NO: 4144 - RNA, 22 nt, Homo Sapiens
agcaggacugaggacaggcccc

SEQ ID NO: 4145 - RNA, 22 nt, Homo Sapiens
acgaggcaggggcucugcuucc

SEQ ID NO: 4146 - RNA, 26 nt, Homo Sapiens
accugccuacggagggugggcucuga

SEQ ID NO: 4147 - RNA, 21 nt, Homo Sapiens
acagaggccucccccagccag

SEQ ID NO: 4148 - RNA, 22 nt, Homo Sapiens
aaaaugugaagcugaacccccu

SEQ ID NO: 4149 - RNA, 24 nt, Homo Sapiens
cagggcugugaugggcgagucccg

SEQ ID NO: 4150 - RNA, 22 nt, Homo Sapiens
ccacuggcgaagauggucucca

SEQ ID NO: 4151 - RNA, 20 nt, Homo Sapiens
ccagagacaugggccuccca

SEQ ID NO: 4152 - RNA, 23 nt, Homo Sapiens
caugacaacugaaggcaaccugg

SEQ ID NO: 4153 - RNA, 21 nt, Homo Sapiens
cccacccccaaagaccugccu

SEQ ID NO: 4154 - RNA, 24 nt, Homo Sapiens
cacuggcgaagauggucuccauau

SEQ ID NO: 4155 - RNA, 24 nt, Homo Sapiens
aucguauuauccaaauuuuguugc

SEQ ID NO: 4156 - RNA, 20 nt, Homo Sapiens
agggagcugcucagaaugcc

SEQ ID NO: 4157 - RNA, 23 nt, Homo Sapiens
augaggcuuuucccaccagcucc

SEQ ID NO: 4158 - RNA, 20 nt, Homo Sapiens
aguggggccuccuugcccag

SEQ ID NO: 4159 - RNA, 24 nt, Homo Sapiens
ugaaaccaggguagaauuguuugg

SEQ ID NO: 4160 - RNA, 25 nt, Homo Sapiens
ucuugcacggugaccccuuuuaguc

SEQ ID NO: 4161 - RNA, 20 nt, Homo Sapiens
ugagaagaaggaagaucuug

SEQ ID NO: 4162 - RNA, 27 nt, Homo Sapiens
ugaggccuuccagaaagcaggagcagc

SEQ ID NO: 4163 - RNA, 26 nt, Homo Sapiens
ugccuaggagcuggcuggcagguguu

SEQ ID NO: 4164 - RNA, 22 nt, Homo Sapiens
ugcauucacaaggugacuggga

SEQ ID NO: 4165 - RNA, 22 nt, Homo Sapiens
ugcccccguuccagcugacauc

SEQ ID NO: 4166 - RNA, 21 nt, Homo Sapiens
ugcccuugugcccugccucca

SEQ ID NO: 4167 - RNA, 26 nt, Homo Sapiens
uggccaggguagacuuggagcugucc

SEQ ID NO: 4168 - RNA, 21 nt, Homo Sapiens
uggcggggcagcaggagcggu

SEQ ID NO: 4169 - RNA, 26 nt, Homo Sapiens
ugucccccacccccaaagaccugccu

SEQ ID NO: 4170 - RNA, 23 nt, Homo Sapiens
uguacauccaaauuaaagggaaa

SEQ ID NO: 4171 - RNA, 28 nt, Homo Sapiens
ugucugguggguggagucaggcuucucu

SEQ ID NO: 4172 - RNA, 23 nt, Homo Sapiens
uguccacccucauuucugccagc

SEQ ID NO: 4173 - RNA, 22 nt, Homo Sapiens
uccucuuggagcugagaugagc

SEQ ID NO: 4174 - RNA, 23 nt, Homo Sapiens
uccucuuggagcugagaugagcc

SEQ ID NO: 4175 - RNA, 23 nt, Homo Sapiens
ucucucuuuucuucucaggauuu

SEQ ID NO: 4176 - RNA, 24 nt, Homo Sapiens
ucuauguaggugauguuuccagcu

SEQ ID NO: 4177 - RNA, 22 nt, Homo Sapiens
ucaggauuuaaaauuuaauuau

SEQ ID NO: 4178 - RNA, 24 nt, Homo Sapiens
ucccccaugugccugucacgcucu

SEQ ID NO: 4179 - RNA, 23 nt, Homo Sapiens
uccagaggggucacguguaggag

SEQ ID NO: 4180 - RNA, 21 nt, Homo Sapiens
uagcuuuuuccuggaaaagcc

SEQ ID NO: 4181 - RNA, 23 nt, Homo Sapiens
uagcuuuuuccuggaaaagcccg

SEQ ID NO: 4182 - RNA, 25 nt, Homo Sapiens
uagacacaucuauaauuuuacacac

SEQ ID NO: 4183 - RNA, 22 nt, Homo Sapiens
uaaaguauccaugcaugugcau

SEQ ID NO: 4184 - RNA, 24 nt, Homo Sapiens
guguuucuuucccaaaaugugccu

SEQ ID NO: 4185 - RNA, 23 nt, Homo Sapiens
guuguugccagguugcagcugcu

SEQ ID NO: 4186 - RNA, 26 nt, Homo Sapiens
guugcagcugcucuugcaucugggcc

SEQ ID NO: 4187 - RNA, 23 nt, Homo Sapiens
uguugccagguugcagcugcucu

SEQ ID NO: 4188 - RNA, 24 nt, Homo Sapiens
uuccagcugacaucuugcacggug

SEQ ID NO: 4189 - RNA, 22 nt, Homo Sapiens
uucucccuucucucuuuucuuc

SEQ ID NO: 4190 - RNA, 27 nt, Homo Sapiens
uucucccuucucucuuuucuucucagg

SEQ ID NO: 4191 - RNA, 20 nt, Homo Sapiens
uuuagucaggagagugcaga

SEQ ID NO: 4192 - RNA, 25 nt, Homo Sapiens
uugcgggguggagugagguuaguuc

SEQ ID NO: 4193 - RNA, 25 nt, Homo Sapiens
uugcagcugcucuugcaucugggcc

SEQ ID NO: 4194 - RNA, 22 nt, Homo Sapiens
uugcccaggucucacugcuuug

SEQ ID NO: 4195 - RNA, 27 nt, Homo Sapiens
uugcccaggucucacugcuuugcaccg

SEQ ID NO: 4196 - RNA, 20 nt, Homo Sapiens
uuucagcugugagcuuucug

SEQ ID NO: 4197 - RNA, 25 nt, Homo Sapiens
uucucagaagugaaaaagacuucaa

SEQ ID NO: 4198 - RNA, 24 nt, Homo Sapiens
uguucugacagcauuucagcugug

SEQ ID NO: 4199 - RNA, 24 nt, Homo Sapiens
uucacaccacugccauuuccuccu

SEQ ID NO: 4200 - RNA, 21 nt, Homo Sapiens
ugguagaguccuaggacaucu

SEQ ID NO: 4201 - RNA, 23 nt, Homo Sapiens
ugcuggcauuugcugcauuucaa

SEQ ID NO: 4202 - RNA, 17 nt, Homo Sapiens
uggaaaccuugcugcua

SEQ ID NO: 4203 - RNA, 25 nt, Homo Sapiens
ugcuucucuaaaacagcacuaucga

SEQ ID NO: 4204 - RNA, 21 nt, Homo Sapiens
ugagccaaguucacaccacug

SEQ ID NO: 4205 - RNA, 22 nt, Homo Sapiens
ugcagugagccaaguucacacc

SEQ ID NO: 4206 - RNA, 22 nt, Homo Sapiens
ugcauguaauccuagcacuuug

SEQ ID NO: 4207 - RNA, 25 nt, Homo Sapiens
uuuugaaauauucacaagguugcug

SEQ ID NO: 4208 - RNA, 21 nt, Homo Sapiens
aguguuacagaguguggguac

SEQ ID NO: 4209 - RNA, 27 nt, Homo Sapiens
aggcucgugcauguaauccuagcacuu

SEQ ID NO: 4210 - RNA, 22 nt, Homo Sapiens
aggcugagacgcaaggaucacu

SEQ ID NO: 4211 - RNA, 22 nt, Homo Sapiens
aggcugagaugggaggaucacu

SEQ ID NO: 4212 - RNA, 29 nt, Homo Sapiens
augggaggaucacuugaggccaagaguuu

SEQ ID NO: 4213 - RNA, 26 nt, Homo Sapiens
auugcugcuuucucuucuacuucuug

SEQ ID NO: 4214 - RNA, 22 nt, Homo Sapiens
cagaagcucaaggcugcaguga

SEQ ID NO: 4215 - RNA, 23 nt, Homo Sapiens
cacugccauuuccuccugggcaa

SEQ ID NO: 4216 - RNA, 23 nt, Homo Sapiens
caccacugccauuuccuccuggg

SEQ ID NO: 4217 - RNA, 19 nt, Homo Sapiens
caaggugaauggugagcag

SEQ ID NO: 4218 - RNA, 19 nt, Homo Sapiens
ccagaagcucaaggcugca

SEQ ID NO: 4219 - RNA, 23 nt, Homo Sapiens
ccagaagcucaaggcugcaguga

SEQ ID NO: 4220 - RNA, 22 nt, Homo Sapiens
aaaauguucugacagcauuuca

SEQ ID NO: 4221 - RNA, 21 nt, Homo Sapiens
aaauguucugacagcauuuca

SEQ ID NO: 4222 - RNA, 13 nt, Homo Sapiens
accaaaugccuuu

SEQ ID NO: 4223 - RNA, 27 nt, Homo Sapiens
acuauugcugcuuucucuucuacuucu

SEQ ID NO: 4224 - RNA, 19 nt, Homo Sapiens
acugccauuuccuccuggg

SEQ ID NO: 4225 - RNA, 22 nt, Homo Sapiens
agaccaaccuggguaacaaagu

SEQ ID NO: 4226 - RNA, 22 nt, Homo Sapiens
cuguggucccagcuacagggga

SEQ ID NO: 4227 - RNA, 25 nt, Homo Sapiens
gcaauugcuucucuaaaacagcacu

SEQ ID NO: 4228 - RNA, 20 nt, Homo Sapiens
cucagguuuccggcuacuga

SEQ ID NO: 4229 - RNA, 25 nt, Homo Sapiens
gccguggcaacuguggaaggcacac

SEQ ID NO: 4230 - RNA, 21 nt, Homo Sapiens
gcagugagccaaguucacacc

SEQ ID NO: 4231 - RNA, 22 nt, Homo Sapiens
gcauguaauccuagcacuuugg

SEQ ID NO: 4232 - RNA, 22 nt, Homo Sapiens
ggaggcugagacgcaaggauca

SEQ ID NO: 4233 - RNA, 22 nt, Homo Sapiens
ggaggcugagaugggaggauca

SEQ ID NO: 4234 - RNA, 21 nt, Homo Sapiens
ggugacuuuccuaugacacuc

SEQ ID NO: 4235 - RNA, 20 nt, Homo Sapiens
gguauuugguaacuugcugu

SEQ ID NO: 4236 - RNA, 21 nt, Homo Sapiens
ggcucgugcauguaauccuag

SEQ ID NO: 4237 - RNA, 25 nt, Homo Sapiens
ggcagaaccuagucuuguuguucau

SEQ ID NO: 4238 - RNA, 21 nt, Homo Sapiens
gguuuugaucucagcauccug

SEQ ID NO: 4239 - RNA, 20 nt, Homo Sapiens
gucagugagucagaggcaga

SEQ ID NO: 4240 - RNA, 20 nt, Homo Sapiens
gcuuugcaaccuuguacuuu

SEQ ID NO: 4241 - RNA, 23 nt, Homo Sapiens
gcugcagcuaauuugugaaagug

SEQ ID NO: 4242 - RNA, 20 nt, Homo Sapiens
cucacagcacauuuguuaau

SEQ ID NO: 4243 - RNA, 27 nt, Homo Sapiens
cgcuaguggguuaucagcuaacacccg

SEQ ID NO: 4244 - RNA, 21 nt, Homo Sapiens
ccuuugucaaaugguauuuuu

SEQ ID NO: 4245 - RNA, 22 nt, Homo Sapiens
ccuuucucucuuucuuuugugc

SEQ ID NO: 4246 - RNA, 24 nt, Homo Sapiens
ccugccuugccccuuaccugccga

SEQ ID NO: 4247 - RNA, 29 nt, Homo Sapiens
ccgccgaggcgcgagguugcggcgcgcag

SEQ ID NO: 4248 - RNA, 23 nt, Homo Sapiens
gauugcuagccuuggcugcucca

SEQ ID NO: 4249 - RNA, 21 nt, Homo Sapiens
gaagaagaaagaagacgcgau

SEQ ID NO: 4250 - RNA, 20 nt, Homo Sapiens
gaaguagugugaguguuaga

SEQ ID NO: 4251 - RNA, 24 nt, Homo Sapiens
gacgccauccuucaaaaacaacua

SEQ ID NO: 4252 - RNA, 21 nt, Homo Sapiens
cuuacacaccugagaaugugc

SEQ ID NO: 4253 - RNA, 23 nt, Homo Sapiens
cuucaaaaacaacuaaaggauga

SEQ ID NO: 4254 - RNA, 26 nt, Homo Sapiens
cugccuggucuuccucccggacgcua

SEQ ID NO: 4255 - RNA, 20 nt, Homo Sapiens
agcuuugcaaccuuguacuu

SEQ ID NO: 4256 - RNA, 22 nt, Homo Sapiens
aggacugaagaaaauccuucag

SEQ ID NO: 4257 - RNA, 20 nt, Homo Sapiens
aauuaaaaagacacuuuuac

SEQ ID NO: 4258 - RNA, 23 nt, Homo Sapiens
acacaguaagauagguucugcuu

SEQ ID NO: 4259 - RNA, 24 nt, Homo Sapiens
acaaguguuucuaguaacaguauu

SEQ ID NO: 4260 - RNA, 26 nt, Homo Sapiens
acaaguguuucuaguaacaguauuuc

SEQ ID NO: 4261 - RNA, 22 nt, Homo Sapiens
aaggauuagcaguguguggaaa

SEQ ID NO: 4262 - RNA, 21 nt, Homo Sapiens
aauauaaaucacagauuucca

SEQ ID NO: 4263 - RNA, 26 nt, Homo Sapiens
aacauagugguauuuuaacauagcag

SEQ ID NO: 4264 - RNA, 22 nt, Homo Sapiens
caugcauucagaucugaaguag

SEQ ID NO: 4265 - RNA, 19 nt, Homo Sapiens
cagcauccuggaaauuugu

SEQ ID NO: 4266 - RNA, 20 nt, Homo Sapiens
cagcauccuggaaauuugug

SEQ ID NO: 4267 - RNA, 25 nt, Homo Sapiens
cagcauccuggaaauuugugugcuu

SEQ ID NO: 4268 - RNA, 27 nt, Homo Sapiens
ccgaggcgcgagguugcggcgcgcagc

SEQ ID NO: 4269 - RNA, 22 nt, Homo Sapiens
cacacaacuguggauaaauuuu

SEQ ID NO: 4270 - RNA, 24 nt, Homo Sapiens
aggcgcgagguugcggcgcgcagc

SEQ ID NO: 4271 - RNA, 22 nt, Homo Sapiens
agucaagucuaccugccuugcc

SEQ ID NO: 4272 - RNA, 23 nt, Homo Sapiens
aguugaaugauaauagcucacag

SEQ ID NO: 4273 - RNA, 24 nt, Homo Sapiens
aucgcgccgagcucccuccauucc

SEQ ID NO: 4274 - RNA, 22 nt, Homo Sapiens
ugaguguuagaaaaaacuggaa

SEQ ID NO: 4275 - RNA, 16 nt, Homo Sapiens
ugccccuuaccugccg

SEQ ID NO: 4276 - RNA, 23 nt, Homo Sapiens
ucuucugucuguacaucguuguc

SEQ ID NO: 4277 - RNA, 21 nt, Homo Sapiens
uggaaacaucugauuucugaa

SEQ ID NO: 4278 - RNA, 20 nt, Homo Sapiens
guuuugaucucagcauccug

SEQ ID NO: 4279 - RNA, 25 nt, Homo Sapiens
uacaaguguuucuaguaacaguauu

SEQ ID NO: 4280 - RNA, 27 nt, Homo Sapiens
uacaaguguuucuaguaacaguauuuc

SEQ ID NO: 4281 - RNA, 19 nt, Homo Sapiens
ucagugagucagaggcaga

SEQ ID NO: 4282 - RNA, 22 nt, Homo Sapiens
ugugugcagaguauacaagugu

SEQ ID NO: 4283 - RNA, 23 nt, Homo Sapiens
uucuugcucugcucaucuacaca

SEQ ID NO: 4284 - RNA, 20 nt, Homo Sapiens
uuguacuuuacaaucaugcc

SEQ ID NO: 4285 - RNA, 24 nt, Homo Sapiens
uuugguugcuuaagacugaagcaa

SEQ ID NO: 4286 - RNA, 21 nt, Homo Sapiens
uuuguugugcuugcugguacu

SEQ ID NO: 4287 - RNA, 23 nt, Homo Sapiens
uucauuguguguuagcagcagug

SEQ ID NO: 4288 - RNA, 23 nt, Homo Sapiens
ugugccuguaaucccagcuacuc

SEQ ID NO: 4289 - RNA, 27 nt, Homo Sapiens
ugucuucaauuaaaagaccacagacuu

SEQ ID NO: 4290 - RNA, 21 nt, Homo Sapiens
uccagccuggguggcagagug

SEQ ID NO: 4291 - RNA, 19 nt, Homo Sapiens
uaaggacaauguaacucua

SEQ ID NO: 4292 - RNA, 25 nt, Homo Sapiens
uggugacaugugccuguaaucccag

SEQ ID NO: 4293 - RNA, 27 nt, Homo Sapiens
ugaccaacguggugaaacccugucucu

SEQ ID NO: 4294 - RNA, 23 nt, Homo Sapiens
ugccuguaaucccagcuacucag

SEQ ID NO: 4295 - RNA, 27 nt, Homo Sapiens
ugccuguaaucccagcuacucaggagg

SEQ ID NO: 4296 - RNA, 22 nt, Homo Sapiens
ugccuguagucccggcacuuug

SEQ ID NO: 4297 - RNA, 22 nt, Homo Sapiens
aucgcuugaacccaggaggcgg

SEQ ID NO: 4298 - RNA, 21 nt, Homo Sapiens
aguggcuuucagcaaaccuca

SEQ ID NO: 4299 - RNA, 22 nt, Homo Sapiens
aggcuaaggcaggagaaucgcu

SEQ ID NO: 4300 - RNA, 22 nt, Homo Sapiens
cacaaggucaggaguucgagac

SEQ ID NO: 4301 - RNA, 22 nt, Homo Sapiens
caccacugcacuccagccuggg

SEQ ID NO: 4302 - RNA, 22 nt, Homo Sapiens
cacugcacuccagccugggugg

SEQ ID NO: 4303 - RNA, 23 nt, Homo Sapiens
auugcaccacugcacuccagccu

SEQ ID NO: 4304 - RNA, 23 nt, Homo Sapiens
augggcauccugaagcugcaagu

SEQ ID NO: 4305 - RNA, 23 nt, Homo Sapiens
cccaggaggcggagguugcagug

SEQ ID NO: 4306 - RNA, 21 nt, Homo Sapiens
ccagccuggguggcagaguga

SEQ ID NO: 4307 - RNA, 22 nt, Homo Sapiens
ccaggaggcggagguugcagug

SEQ ID NO: 4308 - RNA, 23 nt, Homo Sapiens
ccaggaggcggagguugcaguga

SEQ ID NO: 4309 - RNA, 21 nt, Homo Sapiens
caggaggcggagguugcagug

SEQ ID NO: 4310 - RNA, 22 nt, Homo Sapiens
caggaggcggagguugcaguga

SEQ ID NO: 4311 - RNA, 22 nt, Homo Sapiens
ccaacguggugaaacccugucu

SEQ ID NO: 4312 - RNA, 22 nt, Homo Sapiens
ccacugcacuccagccugggug

SEQ ID NO: 4313 - RNA, 21 nt, Homo Sapiens
aaggucaggaguucgagacca

SEQ ID NO: 4314 - RNA, 22 nt, Homo Sapiens
aagcaaauuaguaauugucaau

SEQ ID NO: 4315 - RNA, 22 nt, Homo Sapiens
accagccugaccaacgugguga

SEQ ID NO: 4316 - RNA, 22 nt, Homo Sapiens
acuccagccuggguggcagagu

SEQ ID NO: 4317 - RNA, 20 nt, Homo Sapiens
accuauaucucaguggcaca

SEQ ID NO: 4318 - RNA, 21 nt, Homo Sapiens
aggaggcggagguugcaguga

SEQ ID NO: 4319 - RNA, 22 nt, Homo Sapiens
aggccgaggcaggcagaucaca

SEQ ID NO: 4320 - RNA, 22 nt, Homo Sapiens
agaccagccugaccaacguggu

SEQ ID NO: 4321 - RNA, 21 nt, Homo Sapiens
agaaaauuaguaauuguaagu

SEQ ID NO: 4322 - RNA, 28 nt, Homo Sapiens
agauugcaccacugcacuccagccuggg

SEQ ID NO: 4323 - RNA, 22 nt, Homo Sapiens
cuuucagcaaaccucagucaua

SEQ ID NO: 4324 - RNA, 22 nt, Homo Sapiens
gaacccaggaggcggagguugc

SEQ ID NO: 4325 - RNA, 22 nt, Homo Sapiens
gaccagccugaccaacguggug

SEQ ID NO: 4326 - RNA, 22 nt, Homo Sapiens
ccuguaaucccagcuacucagg

SEQ ID NO: 4327 - RNA, 21 nt, Homo Sapiens
ccuguagucccggcacuuugg

SEQ ID NO: 4328 - RNA, 22 nt, Homo Sapiens
cuaaggcaggagaaucgcuuga

SEQ ID NO: 4329 - RNA, 20 nt, Homo Sapiens
ggaggcggagguugcaguga

SEQ ID NO: 4330 - RNA, 21 nt, Homo Sapiens
ggaggcggagguugcagugag

SEQ ID NO: 4331 - RNA, 22 nt, Homo Sapiens
gccuguagucccggcacuuugg

SEQ ID NO: 4332 - RNA, 23 nt, Homo Sapiens
gccuguaaucccagcuacucagg

SEQ ID NO: 4333 - RNA, 20 nt, Homo Sapiens
guggcuuucagcaaaccuca

SEQ ID NO: 4334 - RNA, 22 nt, Homo Sapiens
ggcaggagaaucgcuugaaccc

SEQ ID NO: 4335 - RNA, 24 nt, Homo Sapiens
cggugaucccggcgacugcgcugg

SEQ ID NO: 4336 - RNA, 27 nt, Homo Sapiens
agagccuaagaaaaucaucuuggccac

SEQ ID NO: 4337 - RNA, 23 nt, Homo Sapiens
aagaaaaucaucuuggccacuuu

SEQ ID NO: 4338 - RNA, 20 nt, Homo Sapiens
aaggagcaaccaaaauguca

SEQ ID NO: 4339 - RNA, 26 nt, Homo Sapiens
aacaucuucaguuuuucucccacugg

SEQ ID NO: 4340 - RNA, 24 nt, Homo Sapiens
aaccggagcugaauuaccuuucac

SEQ ID NO: 4341 - RNA, 27 nt, Homo Sapiens
aaccggagcugaauuaccuuucacuuu

SEQ ID NO: 4342 - RNA, 22 nt, Homo Sapiens
aacucucaguccaacauuauuu

SEQ ID NO: 4343 - RNA, 27 nt, Homo Sapiens
aacuauacaucauuuuugcccucugcc

SEQ ID NO: 4344 - RNA, 22 nt, Homo Sapiens
aacaccauccauuugggaaaga

SEQ ID NO: 4345 - RNA, 22 nt, Homo Sapiens
aaauugcugggauuacaggcau

SEQ ID NO: 4346 - RNA, 27 nt, Homo Sapiens
aaagaacaguaaacauugguaagaaug

SEQ ID NO: 4347 - RNA, 24 nt, Homo Sapiens
aaacaguauguaaaacucuguuuu

SEQ ID NO: 4348 - RNA, 26 nt, Homo Sapiens
aaacuuagcaaaauuagcaauauauu

SEQ ID NO: 4349 - RNA, 23 nt, Homo Sapiens
agauagauggcuuaauaaaauag

SEQ ID NO: 4350 - RNA, 21 nt, Homo Sapiens
agagucuggccaaaacgguaa

SEQ ID NO: 4351 - RNA, 20 nt, Homo Sapiens
agagauuggugaauugaaug

SEQ ID NO: 4352 - RNA, 26 nt, Homo Sapiens
acuuucaaaaacaugaccuuccacaa

SEQ ID NO: 4353 - RNA, 31 nt, Homo Sapiens
agaauaaaagauguagcacauuuugcuuucc

SEQ ID NO: 4354 - RNA, 22 nt, Homo Sapiens
agccuccugaguagcugggauu

SEQ ID NO: 4355 - RNA, 22 nt, Homo Sapiens
agccucccaaauugcugggauu

SEQ ID NO: 4356 - RNA, 22 nt, Homo Sapiens
acccauucauagcauagcuaga

SEQ ID NO: 4357 - RNA, 24 nt, Homo Sapiens
accuugugauuugcccgccucagc

SEQ ID NO: 4358 - RNA, 24 nt, Homo Sapiens
acucauagcaaagucacuucuguu

SEQ ID NO: 4359 - RNA, 22 nt, Homo Sapiens
acucaaacuccugaccuuguga

SEQ ID NO: 4360 - RNA, 26 nt, Homo Sapiens
acucacugacucuucuaugcaguuac

SEQ ID NO: 4361 - RNA, 25 nt, Homo Sapiens
acugucccccaggcuggagugcagu

SEQ ID NO: 4362 - RNA, 27 nt, Homo Sapiens
acucuucuaugcaguuacuacauaucu

SEQ ID NO: 4363 - RNA, 22 nt, Homo Sapiens
acugcaaccuccaccuccuggg

SEQ ID NO: 4364 - RNA, 26 nt, Homo Sapiens
accacuaugcccggcuaauuuuuugg

SEQ ID NO: 4365 - RNA, 20 nt, Homo Sapiens
acacuuuucaaaauaugugg

SEQ ID NO: 4366 - RNA, 23 nt, Homo Sapiens
acaaguauuuuaacucucagucc

SEQ ID NO: 4367 - RNA, 23 nt, Homo Sapiens
aauucagagcagauuagagccug

SEQ ID NO: 4368 - RNA, 21 nt, Homo Sapiens
aauugcugggauuacaggcau

SEQ ID NO: 4369 - RNA, 25 nt, Homo Sapiens
aauauuaucuuucuuaacuuuuucc

SEQ ID NO: 4370 - RNA, 22 nt, Homo Sapiens
ccaccuccuggguuuaagcgau

SEQ ID NO: 4371 - RNA, 22 nt, Homo Sapiens
ccaaauugcugggauuacaggc

SEQ ID NO: 4372 - RNA, 19 nt, Homo Sapiens
caucugccagcugugucau

SEQ ID NO: 4373 - RNA, 20 nt, Homo Sapiens
cauggacucaccacugugug

SEQ ID NO: 4374 - RNA, 22 nt, Homo Sapiens
caggcuggagugcaguggcaug

SEQ ID NO: 4375 - RNA, 27 nt, Homo Sapiens
caggcuggagugcaguggcaugaucuc

SEQ ID NO: 4376 - RNA, 21 nt, Homo Sapiens
caguuuuucucccacuggguc

SEQ ID NO: 4377 - RNA, 20 nt, Homo Sapiens
cauaaaguccagaucuggua

SEQ ID NO: 4378 - RNA, 20 nt, Homo Sapiens
cauaauccucuccaacugga

SEQ ID NO: 4379 - RNA, 19 nt, Homo Sapiens
ccaggcuggagugcagugg

SEQ ID NO: 4380 - RNA, 22 nt, Homo Sapiens
cccaaauugcugggauuacagg

SEQ ID NO: 4381 - RNA, 22 nt, Homo Sapiens
ccccaggcuggagugcaguggc

SEQ ID NO: 4382 - RNA, 25 nt, Homo Sapiens
ccccaggcuggagugcaguggcaug

SEQ ID NO: 4383 - RNA, 20 nt, Homo Sapiens
cccccaggcuggagugcagu

SEQ ID NO: 4384 - RNA, 21 nt, Homo Sapiens
cccccaggcuggagugcagug

SEQ ID NO: 4385 - RNA, 22 nt, Homo Sapiens
cccccaggcuggagugcagugg

SEQ ID NO: 4386 - RNA, 17 nt, Homo Sapiens
cccucugccuguuuucc

SEQ ID NO: 4387 - RNA, 22 nt, Homo Sapiens
augugggaagcauuugauuuuc

SEQ ID NO: 4388 - RNA, 22 nt, Homo Sapiens
auucaaaucacauggcuuucca

SEQ ID NO: 4389 - RNA, 24 nt, Homo Sapiens
auucugcccccaucccaacccagc

SEQ ID NO: 4390 - RNA, 23 nt, Homo Sapiens
auugguaagaaugagcuuucaac

SEQ ID NO: 4391 - RNA, 21 nt, Homo Sapiens
caaccaaaacuuuacaagcuu

SEQ ID NO: 4392 - RNA, 27 nt, Homo Sapiens
caaccaaaaugucacaaccaaaacuuu

SEQ ID NO: 4393 - RNA, 22 nt, Homo Sapiens
cacucacugacucuucuaugca

SEQ ID NO: 4394 - RNA, 27 nt, Homo Sapiens
cacugucccccaggcuggagugcagug

SEQ ID NO: 4395 - RNA, 22 nt, Homo Sapiens
cacuucaccucucugugccuca

SEQ ID NO: 4396 - RNA, 21 nt, Homo Sapiens
caccuccuggguuuaagcgau

SEQ ID NO: 4397 - RNA, 22 nt, Homo Sapiens
caccuccuggguuuaagcgauu

SEQ ID NO: 4398 - RNA, 21 nt, Homo Sapiens
cacauggcuuuccaccaauau

SEQ ID NO: 4399 - RNA, 27 nt, Homo Sapiens
cacaaugauuccuucuuuucuaggcaa

SEQ ID NO: 4400 - RNA, 22 nt, Homo Sapiens
caaguauuuuaacucucagucc

SEQ ID NO: 4401 - RNA, 26 nt, Homo Sapiens
caauauuaucuuucuuaacuuuuucc

SEQ ID NO: 4402 - RNA, 23 nt, Homo Sapiens
aggcuggagugcaguggcaugau

SEQ ID NO: 4403 - RNA, 22 nt, Homo Sapiens
aguaaacauuccaacauugucu

SEQ ID NO: 4404 - RNA, 22 nt, Homo Sapiens
aguggcaugaucucggcucacu

SEQ ID NO: 4405 - RNA, 22 nt, Homo Sapiens
aguuuaugccccucccuugcaa

SEQ ID NO: 4406 - RNA, 20 nt, Homo Sapiens
aguuuuucucccacuggguc

SEQ ID NO: 4407 - RNA, 22 nt, Homo Sapiens
augaucucggcucacugcaacc

SEQ ID NO: 4408 - RNA, 22 nt, Homo Sapiens
cgggcuguuuguuuuacagugu

SEQ ID NO: 4409 - RNA, 25 nt, Homo Sapiens
cucauguauuuuuaucacacuuaua

SEQ ID NO: 4410 - RNA, 22 nt, Homo Sapiens
cucagccucccaaauugcuggg

SEQ ID NO: 4411 - RNA, 20 nt, Homo Sapiens
cucucaguccaacauuauuu

SEQ ID NO: 4412 - RNA, 27 nt, Homo Sapiens
cuccugaccuugugauuugcccgccuc

SEQ ID NO: 4413 - RNA, 22 nt, Homo Sapiens
cucuggauuuccuuuugcuuca

SEQ ID NO: 4414 - RNA, 26 nt, Homo Sapiens
cucuccucagaagaaagaaucuuucc

SEQ ID NO: 4415 - RNA, 22 nt, Homo Sapiens
cugaguagcugggauuacaggc

SEQ ID NO: 4416 - RNA, 22 nt, Homo Sapiens
ccugaguagcugggauuacagg

SEQ ID NO: 4417 - RNA, 26 nt, Homo Sapiens
ccuccaccuccuggguuuaagcgauu

SEQ ID NO: 4418 - RNA, 22 nt, Homo Sapiens
gacacaaaaguccacugaugca

SEQ ID NO: 4419 - RNA, 26 nt, Homo Sapiens
gacucugaaaccucaagcugucuacu

SEQ ID NO: 4420 - RNA, 21 nt, Homo Sapiens
gcaaccuccaccuccuggguu

SEQ ID NO: 4421 - RNA, 24 nt, Homo Sapiens
gcaaaaacuuccaucacaacaaga

SEQ ID NO: 4422 - RNA, 27 nt, Homo Sapiens
gauuacaucauguauuuugccucaugu

SEQ ID NO: 4423 - RNA, 24 nt, Homo Sapiens
gcaauaugucaucuaccuaccuca

SEQ ID NO: 4424 - RNA, 22 nt, Homo Sapiens
gcaccuugcaaaaaugguccug

SEQ ID NO: 4425 - RNA, 25 nt, Homo Sapiens
gaguccagagaggaaacuguggaau

SEQ ID NO: 4426 - RNA, 27 nt, Homo Sapiens
gaguagcugggauuacaggcacccacc

SEQ ID NO: 4427 - RNA, 25 nt, Homo Sapiens
gaaagagauggcuaacaaucuguga

SEQ ID NO: 4428 - RNA, 22 nt, Homo Sapiens
cuuuauuuuuccacaucaugcu

SEQ ID NO: 4429 - RNA, 21 nt, Homo Sapiens
cuucaccucucugugccucag

SEQ ID NO: 4430 - RNA, 22 nt, Homo Sapiens
cuuaauguucaaaaugacuugg

SEQ ID NO: 4431 - RNA, 27 nt, Homo Sapiens
cugugugaccuugggcaagucacuuca

SEQ ID NO: 4432 - RNA, 21 nt, Homo Sapiens
cuuagaauaaaagauguagca

SEQ ID NO: 4433 - RNA, 19 nt, Homo Sapiens
cuuagcaauguucuaauca

SEQ ID NO: 4434 - RNA, 22 nt, Homo Sapiens
cugcaaccuccaccuccugggu

SEQ ID NO: 4435 - RNA, 22 nt, Homo Sapiens
cugugccucaguuuccucaucu

SEQ ID NO: 4436 - RNA, 21 nt, Homo Sapiens
cugucccccaggcuggagugc

SEQ ID NO: 4437 - RNA, 24 nt, Homo Sapiens
cugucccccaggcuggagugcagu

SEQ ID NO: 4438 - RNA, 25 nt, Homo Sapiens
cugucccccaggcuggagugcagug

SEQ ID NO: 4439 - RNA, 22 nt, Homo Sapiens
ggcaagucacuucaccucucug

SEQ ID NO: 4440 - RNA, 25 nt, Homo Sapiens
ggcaauauaaggaaagugauccaaa

SEQ ID NO: 4441 - RNA, 25 nt, Homo Sapiens
ggcaauaugucaucuaccuaccuca

SEQ ID NO: 4442 - RNA, 23 nt, Homo Sapiens
ggcuaauuuuuuggauuuuuaau

SEQ ID NO: 4443 - RNA, 21 nt, Homo Sapiens
ggcucacugcaaccuccaccu

SEQ ID NO: 4444 - RNA, 22 nt, Homo Sapiens
ggcucacugcaaccuccaccuc

SEQ ID NO: 4445 - RNA, 22 nt, Homo Sapiens
gggauuacaggcaugagccacc

SEQ ID NO: 4446 - RNA, 27 nt, Homo Sapiens
ggggcaauaugucaucuaccuaccuca

SEQ ID NO: 4447 - RNA, 24 nt, Homo Sapiens
gugcaaccuaauuaguaacuuucc

SEQ ID NO: 4448 - RNA, 22 nt, Homo Sapiens
gucccccaggcuggagugcagu

SEQ ID NO: 4449 - RNA, 23 nt, Homo Sapiens
gucccccaggcuggagugcagug

SEQ ID NO: 4450 - RNA, 22 nt, Homo Sapiens
gggguuuuaccauguuggccag

SEQ ID NO: 4451 - RNA, 22 nt, Homo Sapiens
gcaugagccaccacacccugcc

SEQ ID NO: 4452 - RNA, 27 nt, Homo Sapiens
gcacugucccccaggcuggagugcagu

SEQ ID NO: 4453 - RNA, 22 nt, Homo Sapiens
gcacuugggagaaggcuuagaa

SEQ ID NO: 4454 - RNA, 24 nt, Homo Sapiens
gcagaaggcuaggaauuuuagcag

SEQ ID NO: 4455 - RNA, 23 nt, Homo Sapiens
gcuuuauuuuuccacaucaugcu

SEQ ID NO: 4456 - RNA, 22 nt, Homo Sapiens
ggaacaaugcuuuuguuuuuua

SEQ ID NO: 4457 - RNA, 22 nt, Homo Sapiens
ggacucaaacuccugaccuugu

SEQ ID NO: 4458 - RNA, 27 nt, Homo Sapiens
ggacucaaacuccugaccuugugauuu

SEQ ID NO: 4459 - RNA, 22 nt, Homo Sapiens
gcucacugcaaccuccaccucc

SEQ ID NO: 4460 - RNA, 21 nt, Homo Sapiens
gcuccaggguuucuguuacua

SEQ ID NO: 4461 - RNA, 17 nt, Homo Sapiens
ugcccaaaaugcacuga

SEQ ID NO: 4462 - RNA, 23 nt, Homo Sapiens
ugaguagcugggauuacaggcac

SEQ ID NO: 4463 - RNA, 22 nt, Homo Sapiens
ugcaaccuccaccuccuggguu

SEQ ID NO: 4464 - RNA, 29 nt, Homo Sapiens
ugcaggagggacucugaaaccucaagcug

SEQ ID NO: 4465 - RNA, 28 nt, Homo Sapiens
ucuuuauucugcccccaucccaacccag

SEQ ID NO: 4466 - RNA, 23 nt, Homo Sapiens
ucuuuuaucugugucuguguauc

SEQ ID NO: 4467 - RNA, 24 nt, Homo Sapiens
ucuuuuaucugugucuguguauca

SEQ ID NO: 4468 - RNA, 20 nt, Homo Sapiens
ugguccuggaguugguagau

SEQ ID NO: 4469 - RNA, 27 nt, Homo Sapiens
uggguuuaagcgauucuccugccucag

SEQ ID NO: 4470 - RNA, 22 nt, Homo Sapiens
ugggauuacaggcaugagccac

SEQ ID NO: 4471 - RNA, 20 nt, Homo Sapiens
ugucccccaggcuggagugc

SEQ ID NO: 4472 - RNA, 22 nt, Homo Sapiens
ugucccccaggcuggagugcag

SEQ ID NO: 4473 - RNA, 23 nt, Homo Sapiens
ugucccccaggcuggagugcagu

SEQ ID NO: 4474 - RNA, 24 nt, Homo Sapiens
ugucccccaggcuggagugcagug

SEQ ID NO: 4475 - RNA, 27 nt, Homo Sapiens
uggaauaaaguccucaaaauugaaaug

SEQ ID NO: 4476 - RNA, 23 nt, Homo Sapiens
ugcuggagccauucauucagcaa

SEQ ID NO: 4477 - RNA, 20 nt, Homo Sapiens
ugcucuguggcuccaggguu

SEQ ID NO: 4478 - RNA, 22 nt, Homo Sapiens
uggacucaaacuccugaccuug

SEQ ID NO: 4479 - RNA, 27 nt, Homo Sapiens
uggacucaaacuccugaccuugugauu

SEQ ID NO: 4480 - RNA, 20 nt, Homo Sapiens
uggagccagcaauccuguuc

SEQ ID NO: 4481 - RNA, 22 nt, Homo Sapiens
uacuaguccaucauagccuaga

SEQ ID NO: 4482 - RNA, 21 nt, Homo Sapiens
uacugaaaacaccauccauuu

SEQ ID NO: 4483 - RNA, 17 nt, Homo Sapiens
uaaaagaguuaaugaac

SEQ ID NO: 4484 - RNA, 22 nt, Homo Sapiens
uaacaucuucaguuuuucuccc

SEQ ID NO: 4485 - RNA, 21 nt, Homo Sapiens
uaggagugauuugcaccuugc

SEQ ID NO: 4486 - RNA, 23 nt, Homo Sapiens
uagauccaguugcacuaaauucc

SEQ ID NO: 4487 - RNA, 26 nt, Homo Sapiens
uauacagucuuuaugaauuucuuaau

SEQ ID NO: 4488 - RNA, 26 nt, Homo Sapiens
uauucccucucaacaaaacuuuauag

SEQ ID NO: 4489 - RNA, 27 nt, Homo Sapiens
ucagauuucauagaaaggagcaaccaa

SEQ ID NO: 4490 - RNA, 24 nt, Homo Sapiens
ucagaucuuucuagucaccuuaga

SEQ ID NO: 4491 - RNA, 18 nt, Homo Sapiens
ucagaucuuuuugguaaa

SEQ ID NO: 4492 - RNA, 22 nt, Homo Sapiens
ucccccaggcuggagugcagug

SEQ ID NO: 4493 - RNA, 18 nt, Homo Sapiens
ucccacugggucaccuca

SEQ ID NO: 4494 - RNA, 27 nt, Homo Sapiens
uccagagaggaaacuguggaauggaaa

SEQ ID NO: 4495 - RNA, 23 nt, Homo Sapiens
ucaugcaaauucuauauuuuaca

SEQ ID NO: 4496 - RNA, 23 nt, Homo Sapiens
ucauuuucagacuuuguacuuca

SEQ ID NO: 4497 - RNA, 27 nt, Homo Sapiens
ucucaacaaaacuuuauaggcagucuu

SEQ ID NO: 4498 - RNA, 22 nt, Homo Sapiens
ucucccacugggucaccucaag

SEQ ID NO: 4499 - RNA, 22 nt, Homo Sapiens
ucucccaucucucuggauuucc

SEQ ID NO: 4500 - RNA, 22 nt, Homo Sapiens
ucucucuggauuuccuuuugcu

SEQ ID NO: 4501 - RNA, 19 nt, Homo Sapiens
uccucuuuuuauuuuuucc

SEQ ID NO: 4502 - RNA, 21 nt, Homo Sapiens
uguguagaugaaaccaucuca

SEQ ID NO: 4503 - RNA, 21 nt, Homo Sapiens
uuagguauuagaaagugauac

SEQ ID NO: 4504 - RNA, 22 nt, Homo Sapiens
uucaaugcuaguguuuaauccu

SEQ ID NO: 4505 - RNA, 21 nt, Homo Sapiens
uuacucuuauucuuagcugua

SEQ ID NO: 4506 - RNA, 23 nt, Homo Sapiens
uuagcacucacugacucuucuau

SEQ ID NO: 4507 - RNA, 21 nt, Homo Sapiens
uuauuuuaaaacagaagaauu

SEQ ID NO: 4508 - RNA, 21 nt, Homo Sapiens
uucauaaccuuuauauuugcc

SEQ ID NO: 4509 - RNA, 19 nt, Homo Sapiens
uucacuuucaaaaacauga

SEQ ID NO: 4510 - RNA, 22 nt, Homo Sapiens
uucagaucuuucuagucaccuu

SEQ ID NO: 4511 - RNA, 21 nt, Homo Sapiens
uucucucuugcccaaauaaua

SEQ ID NO: 4512 - RNA, 22 nt, Homo Sapiens
uucuauaaauaacccauucaua

SEQ ID NO: 4513 - RNA, 25 nt, Homo Sapiens
uucuauauuuuacauucuuggaaag

SEQ ID NO: 4514 - RNA, 23 nt, Homo Sapiens
uuugugcacucugcucuaaaaca

SEQ ID NO: 4515 - RNA, 22 nt, Homo Sapiens
uuuuccauauagagcacuaugu

SEQ ID NO: 4516 - RNA, 20 nt, Homo Sapiens
uuuuaguauaauggugcuau

SEQ ID NO: 4517 - RNA, 26 nt, Homo Sapiens
uugcaaaaaugguccuggaguuggua

SEQ ID NO: 4518 - RNA, 24 nt, Homo Sapiens
uuugaaaaacacaaugauuccuuc

SEQ ID NO: 4519 - RNA, 21 nt, Homo Sapiens
uuguuucuuuaagaaaguacu

SEQ ID NO: 4520 - RNA, 22 nt, Homo Sapiens
uuuaagcgauucuccugccuca

SEQ ID NO: 4521 - RNA, 25 nt, Homo Sapiens
uuuugugcacucugcucuaaaacag

SEQ ID NO: 4522 - RNA, 22 nt, Homo Sapiens
uuuuuaaucuuaaaagauugug

SEQ ID NO: 4523 - RNA, 19 nt, Homo Sapiens
uugucucacuugugcagug

SEQ ID NO: 4524 - RNA, 21 nt, Homo Sapiens
uugcacacaccuucuucuaca

SEQ ID NO: 4525 - RNA, 19 nt, Homo Sapiens
uugguaaaauacuucuuga

SEQ ID NO: 4526 - RNA, 29 nt, Homo Sapiens
ucuacuuuuaaguugcugaugaacucuua

SEQ ID NO: 4527 - RNA, 23 nt, Homo Sapiens
ucucuccugaagcuccauccccu

SEQ ID NO: 4528 - RNA, 20 nt, Homo Sapiens
ucauuuucaaaauggaggga

SEQ ID NO: 4529 - RNA, 19 nt, Homo Sapiens
uccaugccuuccuuucucc

SEQ ID NO: 4530 - RNA, 24 nt, Homo Sapiens
guucucuucucuacccugcccuaa

SEQ ID NO: 4531 - RNA, 21 nt, Homo Sapiens
ugaauaaaugaaccaaaucaa

SEQ ID NO: 4532 - RNA, 28 nt, Homo Sapiens
gccaaguauucugccaauucacccugga

SEQ ID NO: 4533 - RNA, 25 nt, Homo Sapiens
ggcuucuggcugaggccuuacgcau

SEQ ID NO: 4534 - RNA, 23 nt, Homo Sapiens
cugggaccucaguuuuaucauuu

SEQ ID NO: 4535 - RNA, 20 nt, Homo Sapiens
cuguucucuucucuacccug

SEQ ID NO: 4536 - RNA, 20 nt, Homo Sapiens
cuucccuuuuucuaagacua

SEQ ID NO: 4537 - RNA, 22 nt, Homo Sapiens
cuugcacacaccuucuucuaca

SEQ ID NO: 4538 - RNA, 20 nt, Homo Sapiens
gacuauggcuaccaaaaaga

SEQ ID NO: 4539 - RNA, 17 nt, Homo Sapiens
gacuucuuugugcucaa

SEQ ID NO: 4540 - RNA, 23 nt, Homo Sapiens
cgauuucucccuuccuccuagaa

SEQ ID NO: 4541 - RNA, 23 nt, Homo Sapiens
ccuuucucccaaucuccauuccc

SEQ ID NO: 4542 - RNA, 24 nt, Homo Sapiens
ccuucuucuacagaagacacaccu

SEQ ID NO: 4543 - RNA, 24 nt, Homo Sapiens
aucauuuucaaaauggagggaaua

SEQ ID NO: 4544 - RNA, 23 nt, Homo Sapiens
cagaagaguaagaggaucaagac

SEQ ID NO: 4545 - RNA, 20 nt, Homo Sapiens
caacaccauugaaggcucau

SEQ ID NO: 4546 - RNA, 24 nt, Homo Sapiens
auuugcugagcauguacugagccu

SEQ ID NO: 4547 - RNA, 20 nt, Homo Sapiens
cccuggagcacaaucaacaa

SEQ ID NO: 4548 - RNA, 23 nt, Homo Sapiens
cccguuuugacgacgcacuugua

SEQ ID NO: 4549 - RNA, 21 nt, Homo Sapiens
cccauagccaggaaacucugc

SEQ ID NO: 4550 - RNA, 22 nt, Homo Sapiens
cauuuugguaaaauacuucuug

SEQ ID NO: 4551 - RNA, 22 nt, Homo Sapiens
cauuuugguccaaguugugcuu

SEQ ID NO: 4552 - RNA, 24 nt, Homo Sapiens
ccaaucauuuuaauuauuauucuu

SEQ ID NO: 4553 - RNA, 22 nt, Homo Sapiens
acagaugggcaaauuaaggcau

SEQ ID NO: 4554 - RNA, 19 nt, Homo Sapiens
acuauggcuaccaaaaaga

SEQ ID NO: 4555 - RNA, 26 nt, Homo Sapiens
aggaucaagacuucuuugugcucaaa

SEQ ID NO: 4556 - RNA, 30 nt, Homo Sapiens
agaagaccaggcuucucucugguccuuggu

SEQ ID NO: 4557 - RNA, 22 nt, Homo Sapiens
agaaaacuaagaaauaugcaca

SEQ ID NO: 4558 - RNA, 21 nt, Homo Sapiens
aauacaaaacugaauucuucc

SEQ ID NO: 4559 - RNA, 23 nt, Homo Sapiens
aagagccuaguuuuuaauagcua

SEQ ID NO: 4560 - RNA, 21 nt, Homo Sapiens
aagcucagauuauuuaaaugg

SEQ ID NO: 4561 - RNA, 27 nt, Homo Sapiens
agagcuguacccagagaguccugugcu

SEQ ID NO: 4562 - RNA, 24 nt, Homo Sapiens
aauuuggacuggugugcucucuuu

SEQ ID NO: 4563 - RNA, 27 nt, Homo Sapiens
ccaaugcccaacugccugccuuagggu

SEQ ID NO: 4564 - RNA, 21 nt, Homo Sapiens
aguccugugcugaauguggac

SEQ ID NO: 4565 - RNA, 22 nt, Homo Sapiens
ccuguugucuacaccaaugccc

SEQ ID NO: 4566 - RNA, 22 nt, Homo Sapiens
ccucucucaccucuccuacuca

SEQ ID NO: 4567 - RNA, 25 nt, Homo Sapiens
gcacaaggcacaacaggcugcucug

SEQ ID NO: 4568 - RNA, 24 nt, Homo Sapiens
gcuaagaggaucuccuguccauca

SEQ ID NO: 4569 - RNA, 26 nt, Homo Sapiens
gccugacagaaaccacggccacauuu

SEQ ID NO: 4570 - RNA, 22 nt, Homo Sapiens
gcugcucugggauucucuucag

SEQ ID NO: 4571 - RNA, 21 nt, Homo Sapiens
ugguucuaagaaacccucugu

SEQ ID NO: 4572 - RNA, 22 nt, Homo Sapiens
uugagccaggccucucucaccu

SEQ ID NO: 4573 - RNA, 23 nt, Homo Sapiens
uuuggacuggugugcucucuuua

SEQ ID NO: 4574 - RNA, 22 nt, Homo Sapiens
uuggauuucggggcagggggcg

SEQ ID NO: 4575 - RNA, 19 nt, Homo Sapiens
uuacaacuaaauaacacag

SEQ ID NO: 4576 - RNA, 21 nt, Homo Sapiens
ugggugagguaggcgggaaag

SEQ ID NO: 4577 - RNA, 22 nt, Homo Sapiens
ugccuucagggagacaggcagg

SEQ ID NO: 4578 - RNA, 27 nt, Homo Sapiens
ucaagcccccuccaaaggcuccccuac

SEQ ID NO: 4579 - RNA, 21 nt, Homo Sapiens
uccaggcccaugcacugagga

SEQ ID NO: 4580 - RNA, 24 nt, Homo Sapiens
gcuugcccgcucccacagcuuccu

SEQ ID NO: 4581 - RNA, 21 nt, Homo Sapiens
ggagagaaguagcaggaccag

SEQ ID NO: 4582 - RNA, 27 nt, Homo Sapiens
gcggaaacaaggggagcccccagagcu

SEQ ID NO: 4583 - RNA, 19 nt, Homo Sapiens
gggaagggagaguucuuug

SEQ ID NO: 4584 - RNA, 22 nt, Homo Sapiens
gggagacaggcagggagggcuu

SEQ ID NO: 4585 - RNA, 20 nt, Homo Sapiens
gggugagguaggcgggaaag

SEQ ID NO: 4586 - RNA, 23 nt, Homo Sapiens
gugagguaggcgggaaaggaugg

SEQ ID NO: 4587 - RNA, 21 nt, Homo Sapiens
gugggccacacccaggaaggg

SEQ ID NO: 4588 - RNA, 21 nt, Homo Sapiens
gacaggcccucccugucucca

SEQ ID NO: 4589 - RNA, 28 nt, Homo Sapiens
cuuugccaaggcucuccccucucgcccc

SEQ ID NO: 4590 - RNA, 22 nt, Homo Sapiens
ccggggagggggaaagagcagc

SEQ ID NO: 4591 - RNA, 26 nt, Homo Sapiens
ccugucuggaagacguggcucugggu

SEQ ID NO: 4592 - RNA, 23 nt, Homo Sapiens
ccuucccuggccccgccggaugu

SEQ ID NO: 4593 - RNA, 27 nt, Homo Sapiens
cuccagccuccccuccccuggggacgc

SEQ ID NO: 4594 - RNA, 21 nt, Homo Sapiens
cggggagggggaaagagcagc

SEQ ID NO: 4595 - RNA, 23 nt, Homo Sapiens
auaauuuuugcugaauucuuuac

SEQ ID NO: 4596 - RNA, 23 nt, Homo Sapiens
ccacugggagagcugguggugca

SEQ ID NO: 4597 - RNA, 27 nt, Homo Sapiens
caggaagggaaagcgggcagccccguu

SEQ ID NO: 4598 - RNA, 27 nt, Homo Sapiens
ccccaacuccaggggcaccuaugagau

SEQ ID NO: 4599 - RNA, 21 nt, Homo Sapiens
cccagccccaacuccaggggc

SEQ ID NO: 4600 - RNA, 27 nt, Homo Sapiens
cccagccccaacuccaggggcaccuau

SEQ ID NO: 4601 - RNA, 22 nt, Homo Sapiens
ccauccccucccugccugcucc

SEQ ID NO: 4602 - RNA, 16 nt, Homo Sapiens
agcaggaccagagggg

SEQ ID NO: 4603 - RNA, 21 nt, Homo Sapiens
aagccuccugcccccugccgg

SEQ ID NO: 4604 - RNA, 23 nt, Homo Sapiens
aagcuguuuaguuuguuaauuga

SEQ ID NO: 4605 - RNA, 20 nt, Homo Sapiens
agacccuugaagauguagcu

SEQ ID NO: 4606 - RNA, 25 nt, Homo Sapiens
agcucucuaaauugacucagcucca

SEQ ID NO: 4607 - RNA, 25 nt, Homo Sapiens
agcauuuucuuuaccaguauccuua

SEQ ID NO: 4608 - RNA, 22 nt, Homo Sapiens
agccugcuucuuccccaggguu

SEQ ID NO: 4609 - RNA, 18 nt, Homo Sapiens
aauguauauuuaacuucu

SEQ ID NO: 4610 - RNA, 18 nt, Homo Sapiens
accauaaaaacuuacuua

SEQ ID NO: 4611 - RNA, 23 nt, Homo Sapiens
accccuguauuucacgcagcucu

SEQ ID NO: 4612 - RNA, 21 nt, Homo Sapiens
accggcaaccuguaacugccc

SEQ ID NO: 4613 - RNA, 22 nt, Homo Sapiens
cauccagcaugugugugucucu

SEQ ID NO: 4614 - RNA, 25 nt, Homo Sapiens
caggcccaucucagaucuucacuau

SEQ ID NO: 4615 - RNA, 27 nt, Homo Sapiens
ccaacagcaggcccaucucagaucuuc

SEQ ID NO: 4616 - RNA, 22 nt, Homo Sapiens
aggagaugaugugauggaacac

SEQ ID NO: 4617 - RNA, 24 nt, Homo Sapiens
cucagaucuucacuauggcaacuu

SEQ ID NO: 4618 - RNA, 23 nt, Homo Sapiens
ccuuucagaaccaaacacaugcc

SEQ ID NO: 4619 - RNA, 27 nt, Homo Sapiens
ccuccaacucuucuucauccuccuagc

SEQ ID NO: 4620 - RNA, 27 nt, Homo Sapiens
cuugacagaaauguggccauuaagaag

SEQ ID NO: 4621 - RNA, 27 nt, Homo Sapiens
cugcccuuuuaaauggcaugacaaggu

SEQ ID NO: 4622 - RNA, 20 nt, Homo Sapiens
gaaaucaccuguccaucguu

SEQ ID NO: 4623 - RNA, 22 nt, Homo Sapiens
gagaaauggcguggcaggggac

SEQ ID NO: 4624 - RNA, 32 nt, Homo Sapiens
gagaaauggcguggcaggggacccagcgagcc

SEQ ID NO: 4625 - RNA, 21 nt, Homo Sapiens
gauuaaacuguaugucuuaua

SEQ ID NO: 4626 - RNA, 25 nt, Homo Sapiens
gaucaggaucguaguucucaggcac

SEQ ID NO: 4627 - RNA, 27 nt, Homo Sapiens
ggugcagcagugacagcagugagaguc

SEQ ID NO: 4628 - RNA, 19 nt, Homo Sapiens
gguggugcuugcuauaugc

SEQ ID NO: 4629 - RNA, 27 nt, Homo Sapiens
gguggugcuugcuauaugcuuaccuuu

SEQ ID NO: 4630 - RNA, 23 nt, Homo Sapiens
ggcacggaauggcuagugugaga

SEQ ID NO: 4631 - RNA, 25 nt, Homo Sapiens
gccgcugcuuccucuaccccuguau

SEQ ID NO: 4632 - RNA, 21 nt, Homo Sapiens
ggagaugaugugauggaacac

SEQ ID NO: 4633 - RNA, 27 nt, Homo Sapiens
uccucaccccucaauuccuaggggcuu

SEQ ID NO: 4634 - RNA, 27 nt, Homo Sapiens
ucacuuuuuauuuuuaugggggugggu

SEQ ID NO: 4635 - RNA, 25 nt, Homo Sapiens
guggaugugucauauauugccaaac

SEQ ID NO: 4636 - RNA, 21 nt, Homo Sapiens
ucuuuaccaguauccuuaauc

SEQ ID NO: 4637 - RNA, 29 nt, Homo Sapiens
ucuugcaucuaccugcuccuuggccuagu

SEQ ID NO: 4638 - RNA, 19 nt, Homo Sapiens
ugucauauauugccaaaca

SEQ ID NO: 4639 - RNA, 25 nt, Homo Sapiens
uggaucucuacagugccgcguauga

SEQ ID NO: 4640 - RNA, 20 nt, Homo Sapiens
uggccauuaagaagcucagc

SEQ ID NO: 4641 - RNA, 27 nt, Homo Sapiens
uuuuacaaauuuccuuuuuuguccuca

SEQ ID NO: 4642 - RNA, 26 nt, Homo Sapiens
uuugaaccaggauggcugagccccgc

SEQ ID NO: 4643 - RNA, 23 nt, Homo Sapiens
uuucccaggcagcuggcuaguuc

SEQ ID NO: 4644 - RNA, 21 nt, Homo Sapiens
uucggcugcauuucuucacgc

SEQ ID NO: 4645 - RNA, 23 nt, Homo Sapiens
uucgguucccugucuccuccucc

SEQ ID NO: 4646 - RNA, 24 nt, Homo Sapiens
uucaugauuucaaccacauuugcu

SEQ ID NO: 4647 - RNA, 27 nt, Homo Sapiens
uucaugauuucaaccacauuugcuaga

SEQ ID NO: 4648 - RNA, 21 nt, Homo Sapiens
uuccucccucccugcagggua

SEQ ID NO: 4649 - RNA, 27 nt, Homo Sapiens
ugggaccccagccucucacucucaguu

SEQ ID NO: 4650 - RNA, 23 nt, Homo Sapiens
uggaggggcagcgcagccuccca

SEQ ID NO: 4651 - RNA, 21 nt, Homo Sapiens
uggcauccuucccucuaagcc

SEQ ID NO: 4652 - RNA, 25 nt, Homo Sapiens
uggacaucugguugcuuuggccugc

SEQ ID NO: 4653 - RNA, 21 nt, Homo Sapiens
ugguggcaccaggauggaagg

SEQ ID NO: 4654 - RNA, 25 nt, Homo Sapiens
ucuuggggccagccuaagaucaugg

SEQ ID NO: 4655 - RNA, 25 nt, Homo Sapiens
ucuugugcccugcucuucagcacca

SEQ ID NO: 4656 - RNA, 22 nt, Homo Sapiens
ucugguugcuuuggccugcugc

SEQ ID NO: 4657 - RNA, 21 nt, Homo Sapiens
ugccgccgccaccacagccac

SEQ ID NO: 4658 - RNA, 19 nt, Homo Sapiens
ugccaugagaaaagggaag

SEQ ID NO: 4659 - RNA, 27 nt, Homo Sapiens
ugcccccagcugcuccucgcaguucgg

SEQ ID NO: 4660 - RNA, 17 nt, Homo Sapiens
uagagggagggagcagc

SEQ ID NO: 4661 - RNA, 28 nt, Homo Sapiens
uccuccucccgucacagaugugagccag

SEQ ID NO: 4662 - RNA, 20 nt, Homo Sapiens
uccccccagggcugggcacu

SEQ ID NO: 4663 - RNA, 21 nt, Homo Sapiens
ucagugaugggaguaagagca

SEQ ID NO: 4664 - RNA, 25 nt, Homo Sapiens
ggacaugaaaucaucuuagcuuagc

SEQ ID NO: 4665 - RNA, 24 nt, Homo Sapiens
gcgagggcagaggugaucaccugc

SEQ ID NO: 4666 - RNA, 21 nt, Homo Sapiens
gcagaggggaggaggaagcac

SEQ ID NO: 4667 - RNA, 23 nt, Homo Sapiens
gcagaggggaggaggaagcacaa

SEQ ID NO: 4668 - RNA, 21 nt, Homo Sapiens
ggcaggggcugggcagagggg

SEQ ID NO: 4669 - RNA, 25 nt, Homo Sapiens
ggcccuugggguuucucuuuuccac

SEQ ID NO: 4670 - RNA, 26 nt, Homo Sapiens
ggccgaggcaggggcugggcagaggg

SEQ ID NO: 4671 - RNA, 24 nt, Homo Sapiens
gggacuucaaaaucagugauggga

SEQ ID NO: 4672 - RNA, 21 nt, Homo Sapiens
guggugagacuguauccuguu

SEQ ID NO: 4673 - RNA, 27 nt, Homo Sapiens
gugagugugacggggguuggggugggg

SEQ ID NO: 4674 - RNA, 23 nt, Homo Sapiens
guccuaagcccacaaucaugccu

SEQ ID NO: 4675 - RNA, 23 nt, Homo Sapiens
gucaggagacacuguucccaaag

SEQ ID NO: 4676 - RNA, 26 nt, Homo Sapiens
gagugugugggggucugggaggcagg

SEQ ID NO: 4677 - RNA, 27 nt, Homo Sapiens
gagcccaaucacugccuauaccccuca

SEQ ID NO: 4678 - RNA, 26 nt, Homo Sapiens
gaggaugguucucucuggucauagcc

SEQ ID NO: 4679 - RNA, 22 nt, Homo Sapiens
gcaauuccuuuugauucuuuuu

SEQ ID NO: 4680 - RNA, 21 nt, Homo Sapiens
gacucacuuuaucaauaguuc

SEQ ID NO: 4681 - RNA, 21 nt, Homo Sapiens
gaccccagccucucacucuca

SEQ ID NO: 4682 - RNA, 20 nt, Homo Sapiens
gaagagggagaaggagaggc

SEQ ID NO: 4683 - RNA, 27 nt, Homo Sapiens
cugggccacuggcaucucuggagugug

SEQ ID NO: 4684 - RNA, 28 nt, Homo Sapiens
cugggacucguguggccuguguggugcc

SEQ ID NO: 4685 - RNA, 19 nt, Homo Sapiens
cuuucugucugugaauguc

SEQ ID NO: 4686 - RNA, 20 nt, Homo Sapiens
ccucugugccaccucucaca

SEQ ID NO: 4687 - RNA, 26 nt, Homo Sapiens
ccuuggggcucccugugucagggcac

SEQ ID NO: 4688 - RNA, 19 nt, Homo Sapiens
cuaagcccacaaucaugcc

SEQ ID NO: 4689 - RNA, 25 nt, Homo Sapiens
cucugggaucucccccuuguggggc

SEQ ID NO: 4690 - RNA, 21 nt, Homo Sapiens
agggcgccugagccuaggcgg

SEQ ID NO: 4691 - RNA, 21 nt, Homo Sapiens
aggccuggccccuuccugugc

SEQ ID NO: 4692 - RNA, 21 nt, Homo Sapiens
agggugaucagugcuggcaga

SEQ ID NO: 4693 - RNA, 27 nt, Homo Sapiens
auccuguuugcuauugcuuguugugcu

SEQ ID NO: 4694 - RNA, 26 nt, Homo Sapiens
cacuuaaccugcuuuugucacucggc

SEQ ID NO: 4695 - RNA, 24 nt, Homo Sapiens
cacugggacucguguggccugugu

SEQ ID NO: 4696 - RNA, 25 nt, Homo Sapiens
cacagacuaggucuuguggcugguc

SEQ ID NO: 4697 - RNA, 22 nt, Homo Sapiens
cacagccaccuucuccuccucc

SEQ ID NO: 4698 - RNA, 21 nt, Homo Sapiens
ccaacagcagcgccgcugcca

SEQ ID NO: 4699 - RNA, 22 nt, Homo Sapiens
ccacagaaacccuguuuuauug

SEQ ID NO: 4700 - RNA, 22 nt, Homo Sapiens
caggcugggugucuugguuguc

SEQ ID NO: 4701 - RNA, 18 nt, Homo Sapiens
caggcagcuggcuaguuc

SEQ ID NO: 4702 - RNA, 27 nt, Homo Sapiens
ccccagccaggugcaggcguaggaaua

SEQ ID NO: 4703 - RNA, 20 nt, Homo Sapiens
cccuacuuccccuuggggcu

SEQ ID NO: 4704 - RNA, 25 nt, Homo Sapiens
ccccugagaaggccuggccccuucc

SEQ ID NO: 4705 - RNA, 26 nt, Homo Sapiens
ccccgucugcgccgcugugcuguugu

SEQ ID NO: 4706 - RNA, 24 nt, Homo Sapiens
cccugcucuucagcaccaugggcc

SEQ ID NO: 4707 - RNA, 19 nt, Homo Sapiens
accuacuccauacugaggg

SEQ ID NO: 4708 - RNA, 27 nt, Homo Sapiens
accaggauggcugagccccgccaggag

SEQ ID NO: 4709 - RNA, 22 nt, Homo Sapiens
aggcaggggcugggcagagggg

SEQ ID NO: 4710 - RNA, 24 nt, Homo Sapiens
agaaggagaaggaaauguggggua

SEQ ID NO: 4711 - RNA, 23 nt, Homo Sapiens
agcagcaggcugggugucuuggu

SEQ ID NO: 4712 - RNA, 22 nt, Homo Sapiens
aacuucugauuucucuucagcu

SEQ ID NO: 4713 - RNA, 19 nt, Homo Sapiens
aagagggagaaggagaggc

SEQ ID NO: 4714 - RNA, 19 nt, Homo Sapiens
aacuccaucugcugccaug

SEQ ID NO: 4715 - RNA, 20 nt, Homo Sapiens
aacuccaucugcugccauga

SEQ ID NO: 4716 - RNA, 21 nt, Homo Sapiens
aacccuguuuuauugaguucu

SEQ ID NO: 4717 - RNA, 20 nt, Homo Sapiens
aaacuucugauuucucuuca

SEQ ID NO: 4718 - RNA, 21 nt, Homo Sapiens
aaaacuucugauuucucuuca

SEQ ID NO: 4719 - RNA, 23 nt, Homo Sapiens
aaacucauuuuugccauacauca

SEQ ID NO: 4720 - RNA, 26 nt, Homo Sapiens
aaaacaaugcaaaaccuuugagguag

SEQ ID NO: 4721 - RNA, 22 nt, Homo Sapiens
aaauuauaguuucaagccaacu

SEQ ID NO: 4722 - RNA, 23 nt, Homo Sapiens
aaguggggcaaaaccuugcuaau

SEQ ID NO: 4723 - RNA, 23 nt, Homo Sapiens
acuuauuuuauuuccaucauguc

SEQ ID NO: 4724 - RNA, 22 nt, Homo Sapiens
agcucugcaucuccugucuuuu

SEQ ID NO: 4725 - RNA, 27 nt, Homo Sapiens
agcucugcaucuccugucuuuucaggu

SEQ ID NO: 4726 - RNA, 21 nt, Homo Sapiens
aaugcugccuucccaugaauc

SEQ ID NO: 4727 - RNA, 20 nt, Homo Sapiens
acuauccugacuucuaauau

SEQ ID NO: 4728 - RNA, 22 nt, Homo Sapiens
acucuucacuguuagcuuuuua

SEQ ID NO: 4729 - RNA, 23 nt, Homo Sapiens
acugaacaauggcccuguagcca

SEQ ID NO: 4730 - RNA, 21 nt, Homo Sapiens
cagcucuaauaaaacagcugu

SEQ ID NO: 4731 - RNA, 26 nt, Homo Sapiens
ccagaagaagaguaggugacacuaua

SEQ ID NO: 4732 - RNA, 20 nt, Homo Sapiens
cauucuuguugccacagcug

SEQ ID NO: 4733 - RNA, 21 nt, Homo Sapiens
cauugccuaacuacuaguuuu

SEQ ID NO: 4734 - RNA, 22 nt, Homo Sapiens
auuuccauaguucccugcggcc

SEQ ID NO: 4735 - RNA, 23 nt, Homo Sapiens
auuguggaucuuuucauucucau

SEQ ID NO: 4736 - RNA, 23 nt, Homo Sapiens
augggcccuaggggucacuguac

SEQ ID NO: 4737 - RNA, 22 nt, Homo Sapiens
auacuauaacauauguacauaa

SEQ ID NO: 4738 - RNA, 27 nt, Homo Sapiens
auacuauaacauauguacauaaauugc

SEQ ID NO: 4739 - RNA, 26 nt, Homo Sapiens
aguauguguccaaugcugccuuccca

SEQ ID NO: 4740 - RNA, 27 nt, Homo Sapiens
aggcgcuuggcugggcucucagcccgc

SEQ ID NO: 4741 - RNA, 20 nt, Homo Sapiens
cuccugacagggugaccuug

SEQ ID NO: 4742 - RNA, 22 nt, Homo Sapiens
ccuuugagguagaccaggauuu

SEQ ID NO: 4743 - RNA, 25 nt, Homo Sapiens
ccuuacccuuuccuccuuuaucaca

SEQ ID NO: 4744 - RNA, 19 nt, Homo Sapiens
ccugagagugucucugaua

SEQ ID NO: 4745 - RNA, 22 nt, Homo Sapiens
ccucacacauccagacaucaug

SEQ ID NO: 4746 - RNA, 19 nt, Homo Sapiens
cuuuaggguaaaaauugcg

SEQ ID NO: 4747 - RNA, 21 nt, Homo Sapiens
cuuguugccacagcuggagcu

SEQ ID NO: 4748 - RNA, 21 nt, Homo Sapiens
cuuacuugagccuuuaaugga

SEQ ID NO: 4749 - RNA, 21 nt, Homo Sapiens
cuuauuucuucaaauccuucc

SEQ ID NO: 4750 - RNA, 22 nt, Homo Sapiens
cuuauuuuauuuccaucauguc

SEQ ID NO: 4751 - RNA, 21 nt, Homo Sapiens
cuggcuucuuucucucagccu

SEQ ID NO: 4752 - RNA, 25 nt, Homo Sapiens
cugucucccaguuaugaaucagugg

SEQ ID NO: 4753 - RNA, 27 nt, Homo Sapiens
cugucucuugaaaaaugcccauuugcc

SEQ ID NO: 4754 - RNA, 20 nt, Homo Sapiens
cugcauguuaccaucuuacu

SEQ ID NO: 4755 - RNA, 22 nt, Homo Sapiens
gaacaacaacuauccugacuuc

SEQ ID NO: 4756 - RNA, 22 nt, Homo Sapiens
gaauuugccauucugcuguaca

SEQ ID NO: 4757 - RNA, 20 nt, Homo Sapiens
gacugugacaacugucuaac

SEQ ID NO: 4758 - RNA, 20 nt, Homo Sapiens
gaugaaagcagggaauuucu

SEQ ID NO: 4759 - RNA, 21 nt, Homo Sapiens
gaguucuggucaaagaaagaa

SEQ ID NO: 4760 - RNA, 28 nt, Homo Sapiens
gauacccuuacccuuuccuccuuuauca

SEQ ID NO: 4761 - RNA, 25 nt, Homo Sapiens
gucacuuuauuacucccagaacaac

SEQ ID NO: 4762 - RNA, 27 nt, Homo Sapiens
gucggcucagcagccuccaacuucucc

SEQ ID NO: 4763 - RNA, 28 nt, Homo Sapiens
gugaaccaagaucuauaaagcgauauac

SEQ ID NO: 4764 - RNA, 24 nt, Homo Sapiens
gugagacaaaauuuuaguccaaau

SEQ ID NO: 4765 - RNA, 21 nt, Homo Sapiens
gguagaccaggauuucuaauc

SEQ ID NO: 4766 - RNA, 26 nt, Homo Sapiens
ggcuuccugcaauuuucuaagcaauu

SEQ ID NO: 4767 - RNA, 20 nt, Homo Sapiens
ggggaguuauguuuuguuac

SEQ ID NO: 4768 - RNA, 19 nt, Homo Sapiens
gcagccgcccaacuccugg

SEQ ID NO: 4769 - RNA, 28 nt, Homo Sapiens
gccacuagacucuucacuguuagcuuuu

SEQ ID NO: 4770 - RNA, 17 nt, Homo Sapiens
gcucuaaaagcaccucc

SEQ ID NO: 4771 - RNA, 23 nt, Homo Sapiens
ggaauuugccauucugcuguaca

SEQ ID NO: 4772 - RNA, 21 nt, Homo Sapiens
ggaacaacucuccagugccug

SEQ ID NO: 4773 - RNA, 20 nt, Homo Sapiens
ucaguuauucauucugugau

SEQ ID NO: 4774 - RNA, 22 nt, Homo Sapiens
uccauuuuggcgcuauuacaaa

SEQ ID NO: 4775 - RNA, 26 nt, Homo Sapiens
uccugacagggugaccuuggguauuu

SEQ ID NO: 4776 - RNA, 24 nt, Homo Sapiens
uccuuuaucacaaccaccguuaca

SEQ ID NO: 4777 - RNA, 21 nt, Homo Sapiens
ucucucagccuuacauuugug

SEQ ID NO: 4778 - RNA, 22 nt, Homo Sapiens
uagaaaacaaugcaaaaccuuu

SEQ ID NO: 4779 - RNA, 23 nt, Homo Sapiens
ucaaguuugggucugugcugcug

SEQ ID NO: 4780 - RNA, 19 nt, Homo Sapiens
guuauucauucugugauca

SEQ ID NO: 4781 - RNA, 27 nt, Homo Sapiens
uaaaugaugaguauuaguucccugucu

SEQ ID NO: 4782 - RNA, 23 nt, Homo Sapiens
ugcggccucugccuuggggaguu

SEQ ID NO: 4783 - RNA, 20 nt, Homo Sapiens
ugcaccuauguagcucugca

SEQ ID NO: 4784 - RNA, 22 nt, Homo Sapiens
ugaaucugucucccaguuauga

SEQ ID NO: 4785 - RNA, 24 nt, Homo Sapiens
ugucuucaaaagaagcauugcagc

SEQ ID NO: 4786 - RNA, 21 nt, Homo Sapiens
uucauucugugaucauuuauu

SEQ ID NO: 4787 - RNA, 27 nt, Homo Sapiens
uucauucugugaucauuuauuuuaagc

SEQ ID NO: 4788 - RNA, 25 nt, Homo Sapiens
uugaccgagagcaggcuggagcagc

SEQ ID NO: 4789 - RNA, 25 nt, Homo Sapiens
uucuuguugccacagcuggagcucu

SEQ ID NO: 4790 - RNA, 20 nt, Homo Sapiens
uucuuucucucagccuuaca

SEQ ID NO: 4791 - RNA, 29 nt, Homo Sapiens
uugccauucugcuguacagacacugauuu

SEQ ID NO: 4792 - RNA, 24 nt, Homo Sapiens
uuguaccugcuuugacugaugcug

SEQ ID NO: 4793 - RNA, 23 nt, Homo Sapiens
uuuaagugucugaaucgagugag

SEQ ID NO: 4794 - RNA, 23 nt, Homo Sapiens
uugggccucugcuucucucaccu

SEQ ID NO: 4795 - RNA, 18 nt, Homo Sapiens
uuuuauuuccaucauguc

SEQ ID NO: 4796 - RNA, 20 nt, Homo Sapiens
uuuauccauagacagggccc

SEQ ID NO: 4797 - RNA, 22 nt, Homo Sapiens
uauugagcaccuacuacaugca

SEQ ID NO: 4798 - RNA, 23 nt, Homo Sapiens
uccuugcccuagaugagcccagc

SEQ ID NO: 4799 - RNA, 22 nt, Homo Sapiens
uccucacccugauuucuugcuu

SEQ ID NO: 4800 - RNA, 25 nt, Homo Sapiens
ucaggugagcuguggaggugggguc

SEQ ID NO: 4801 - RNA, 22 nt, Homo Sapiens
ggagaagagagauggggguucc

SEQ ID NO: 4802 - RNA, 22 nt, Homo Sapiens
ggagcacagcucaggaacuaga

SEQ ID NO: 4803 - RNA, 21 nt, Homo Sapiens
ggaggugggguccuuggaagc

SEQ ID NO: 4804 - RNA, 20 nt, Homo Sapiens
gcuccccuuuuucuuccuca

SEQ ID NO: 4805 - RNA, 21 nt, Homo Sapiens
gcucaggaacuagacugccug

SEQ ID NO: 4806 - RNA, 21 nt, Homo Sapiens
gcugggcugugugguugacuu

SEQ ID NO: 4807 - RNA, 23 nt, Homo Sapiens
gcccagcccuguucugggugcag

SEQ ID NO: 4808 - RNA, 24 nt, Homo Sapiens
gggccuguugcccuuucuguacca

SEQ ID NO: 4809 - RNA, 21 nt, Homo Sapiens
gggaagccuccuaaggccagg

SEQ ID NO: 4810 - RNA, 27 nt, Homo Sapiens
ggccagguaagggggugcagcagugag

SEQ ID NO: 4811 - RNA, 25 nt, Homo Sapiens
ggcuccccuuuuucuuccucacccu

SEQ ID NO: 4812 - RNA, 20 nt, Homo Sapiens
ggugagcuguggaggugggg

SEQ ID NO: 4813 - RNA, 27 nt, Homo Sapiens
gagcaaauuacccuccuuaaacaagag

SEQ ID NO: 4814 - RNA, 26 nt, Homo Sapiens
cuuguaaauuacaucugucaugguuu

SEQ ID NO: 4815 - RNA, 16 nt, Homo Sapiens
ccucaaggaggucugg

SEQ ID NO: 4816 - RNA, 23 nt, Homo Sapiens
ccucugguucuucauuuauugag

SEQ ID NO: 4817 - RNA, 21 nt, Homo Sapiens
cugaguauguggaaggcagca

SEQ ID NO: 4818 - RNA, 28 nt, Homo Sapiens
cugaguauguggaaggcagcagagcgga

SEQ ID NO: 4819 - RNA, 21 nt, Homo Sapiens
agggcccacuuguauccucug

SEQ ID NO: 4820 - RNA, 23 nt, Homo Sapiens
aucuguguccugguuagcagagc

SEQ ID NO: 4821 - RNA, 22 nt, Homo Sapiens
cagcucaggaacuagacugccu

SEQ ID NO: 4822 - RNA, 17 nt, Homo Sapiens
cccucaaggaggucugg

SEQ ID NO: 4823 - RNA, 23 nt, Homo Sapiens
acagcucaggaacuagacugccu

SEQ ID NO: 4824 - RNA, 22 nt, Homo Sapiens
aggcagcagagcggacugguga

SEQ ID NO: 4825 - RNA, 23 nt, Homo Sapiens
aaggcagcagagcggacugguga

SEQ ID NO: 4826 - RNA, 21 nt, Homo Sapiens
ccagcugcugcucuccucgac

SEQ ID NO: 4827 - RNA, 25 nt, Homo Sapiens
cguucaccgccuccagcugcugcuc

SEQ ID NO: 4828 - RNA, 23 nt, Homo Sapiens
ccugguguucccuuucccugcug

SEQ ID NO: 4829 - RNA, 24 nt, Homo Sapiens
ccugguguucccuuucccugcuga

SEQ ID NO: 4830 - RNA, 22 nt, Homo Sapiens
gcugcucuccucgacauggacc

SEQ ID NO: 4831 - RNA, 22 nt, Homo Sapiens
gcuggggugagaguaagcugcu

SEQ ID NO: 4832 - RNA, 22 nt, Homo Sapiens
gcucacaccuguaaucucagca

SEQ ID NO: 4833 - RNA, 22 nt, Homo Sapiens
ggaggcugaggugggcagauca

SEQ ID NO: 4834 - RNA, 23 nt, Homo Sapiens
gccuguaaucccagcuacucagg

SEQ ID NO: 4835 - RNA, 26 nt, Homo Sapiens
gccuguaaucccagcuacucaggaga

SEQ ID NO: 4836 - RNA, 21 nt, Homo Sapiens
ggggugagaguaagcugcuga

SEQ ID NO: 4837 - RNA, 23 nt, Homo Sapiens
ccuggcugcugccauaguuucug

SEQ ID NO: 4838 - RNA, 22 nt, Homo Sapiens
ccuguaaucccagcuacucagg

SEQ ID NO: 4839 - RNA, 21 nt, Homo Sapiens
ccuguaaucucagcacuuugg

SEQ ID NO: 4840 - RNA, 21 nt, Homo Sapiens
cgcucacaccuguaaucucag

SEQ ID NO: 4841 - RNA, 25 nt, Homo Sapiens
cucgcucuugacagaugucugggaa

SEQ ID NO: 4842 - RNA, 27 nt, Homo Sapiens
cuugacagaugucugggaaagcagagu

SEQ ID NO: 4843 - RNA, 25 nt, Homo Sapiens
gaaagagaauuuuauuuauaaauga

SEQ ID NO: 4844 - RNA, 20 nt, Homo Sapiens
cuggcugcugccauaguuuc

SEQ ID NO: 4845 - RNA, 22 nt, Homo Sapiens
gagccccagaggcagagguugu

SEQ ID NO: 4846 - RNA, 22 nt, Homo Sapiens
gcacacgccuguaaucccagcu

SEQ ID NO: 4847 - RNA, 20 nt, Homo Sapiens
ccgagaucgcgccaguacau

SEQ ID NO: 4848 - RNA, 21 nt, Homo Sapiens
cagaggcagagguugugguga

SEQ ID NO: 4849 - RNA, 16 nt, Homo Sapiens
cauaggccgggcacag

SEQ ID NO: 4850 - RNA, 21 nt, Homo Sapiens
ccagaggcagagguuguggug

SEQ ID NO: 4851 - RNA, 22 nt, Homo Sapiens
ccagaggcagagguugugguga

SEQ ID NO: 4852 - RNA, 26 nt, Homo Sapiens
ccacaaccaacaccacaaaccuuuca

SEQ ID NO: 4853 - RNA, 23 nt, Homo Sapiens
aggcugaggugggcagaucaacu

SEQ ID NO: 4854 - RNA, 22 nt, Homo Sapiens
aguaagcugcugaaugcauuca

SEQ ID NO: 4855 - RNA, 21 nt, Homo Sapiens
caccuguaaucucagcacuuu

SEQ ID NO: 4856 - RNA, 22 nt, Homo Sapiens
caccuguaaucucagcacuuug

SEQ ID NO: 4857 - RNA, 22 nt, Homo Sapiens
cacaccuguaaucucagcacuu

SEQ ID NO: 4858 - RNA, 23 nt, Homo Sapiens
cacgccuguaaucccagcuacuc

SEQ ID NO: 4859 - RNA, 27 nt, Homo Sapiens
accacaaccaacaccacaaaccuuuca

SEQ ID NO: 4860 - RNA, 23 nt, Homo Sapiens
aaugcgguucagggcugggguga

SEQ ID NO: 4861 - RNA, 25 nt, Homo Sapiens
acaaaagggguaauugcauucuucu

SEQ ID NO: 4862 - RNA, 22 nt, Homo Sapiens
acaccuguaaucucagcacuuu

SEQ ID NO: 4863 - RNA, 21 nt, Homo Sapiens
accuguaaucucagcacuuug

SEQ ID NO: 4864 - RNA, 22 nt, Homo Sapiens
accuguaaucucagcacuuugg

SEQ ID NO: 4865 - RNA, 31 nt, Homo Sapiens
ucaguuaauggcucaucaacaaucacaacca

SEQ ID NO: 4866 - RNA, 23 nt, Homo Sapiens
ucccuugagccccagaggcagag

SEQ ID NO: 4867 - RNA, 22 nt, Homo Sapiens
ucagcuggcagaguuagcauug

SEQ ID NO: 4868 - RNA, 26 nt, Homo Sapiens
ucagcacuuugggaggcugagguggg

SEQ ID NO: 4869 - RNA, 27 nt, Homo Sapiens
ucagcacuuugggaggcugaggugggc

SEQ ID NO: 4870 - RNA, 19 nt, Homo Sapiens
uaaaugagugccacaaaag

SEQ ID NO: 4871 - RNA, 24 nt, Homo Sapiens
uggugcacacgccuguaaucccag

SEQ ID NO: 4872 - RNA, 27 nt, Homo Sapiens
uuaauggcucaucaacaaucacaacca

SEQ ID NO: 4873 - RNA, 22 nt, Homo Sapiens
uguggugagccgagaucgcgcc

SEQ ID NO: 4874 - RNA, 30 nt, Homo Sapiens
uuagaagcagaucauuucccaaaauucuaa

SEQ ID NO: 4875 - RNA, 26 nt, Homo Sapiens
uucuaagagcagcagcauauguuguu

SEQ ID NO: 4876 - RNA, 30 nt, Homo Sapiens
ugcacauucacugaauucacugagauuauu

SEQ ID NO: 4877 - RNA, 22 nt, Homo Sapiens
uaaggcggaggucgcgggcggg

SEQ ID NO: 4878 - RNA, 22 nt, Homo Sapiens
uagggaagaguucugaucugua

SEQ ID NO: 4879 - RNA, 26 nt, Homo Sapiens
accaugucgcgcucagugcugcagcc

SEQ ID NO: 4880 - RNA, 27 nt, Homo Sapiens
aaauacuguaacacuguauaacauuua

SEQ ID NO: 4881 - RNA, 26 nt, Homo Sapiens
caacauuggaugugcauuucugugau

SEQ ID NO: 4882 - RNA, 26 nt, Homo Sapiens
caugucgcgcucagugcugcagccca

SEQ ID NO: 4883 - RNA, 18 nt, Homo Sapiens
ccagcaccaccaugucgc

SEQ ID NO: 4884 - RNA, 23 nt, Homo Sapiens
cccaaaauucuaagagcagcagc

SEQ ID NO: 4885 - RNA, 27 nt, Homo Sapiens
cggaaggcaggaggcugccggggcgcg

SEQ ID NO: 4886 - RNA, 21 nt, Homo Sapiens
gguuguauuuucugaucauug

SEQ ID NO: 4887 - RNA, 18 nt, Homo Sapiens
gugcauuucugugauguu

SEQ ID NO: 4888 - RNA, 17 nt, Homo Sapiens
gcgggaggggaggaggc

SEQ ID NO: 4889 - RNA, 23 nt, Homo Sapiens
ggaaggcaggaggcugccggggc

SEQ ID NO: 4890 - RNA, 21 nt, Homo Sapiens
gccagauuuugggauuacaaa

SEQ ID NO: 4891 - RNA, 24 nt, Homo Sapiens
cuggaaccucccugggccugucuc

SEQ ID NO: 4892 - RNA, 23 nt, Homo Sapiens
cccaccccuguacccagccaccu

SEQ ID NO: 4893 - RNA, 23 nt, Homo Sapiens
ccccugaggacaggggcaucucu

SEQ ID NO: 4894 - RNA, 20 nt, Homo Sapiens
ccagauuuugggauuacaaa

SEQ ID NO: 4895 - RNA, 22 nt, Homo Sapiens
auugccucccuuccuccgcucc

SEQ ID NO: 4896 - RNA, 22 nt, Homo Sapiens
cacgaacuuccggucucuuagg

SEQ ID NO: 4897 - RNA, 25 nt, Homo Sapiens
cacuggaaccucccugggccugucu

SEQ ID NO: 4898 - RNA, 30 nt, Homo Sapiens
cacuggaaccucccugggccugucucagau

SEQ ID NO: 4899 - RNA, 17 nt, Homo Sapiens
cacuuccuagagcaucu

SEQ ID NO: 4900 - RNA, 24 nt, Homo Sapiens
cacaaccacuaauuugucacugga

SEQ ID NO: 4901 - RNA, 16 nt, Homo Sapiens
agcuucuugcuccugu

SEQ ID NO: 4902 - RNA, 23 nt, Homo Sapiens
uggguaucccaccuccagcccac

SEQ ID NO: 4903 - RNA, 23 nt, Homo Sapiens
uuaacucccuaguuacccacccu

SEQ ID NO: 4904 - RNA, 18 nt, Homo Sapiens
uuucuugccagcucagca

SEQ ID NO: 4905 - RNA, 26 nt, Homo Sapiens
uugccucccuuccuccgcuccccuuu

SEQ ID NO: 4906 - RNA, 19 nt, Homo Sapiens
uugcucugugcugacugug

SEQ ID NO: 4907 - RNA, 20 nt, Homo Sapiens
uuugcucugugcugacugug

SEQ ID NO: 4908 - RNA, 22 nt, Homo Sapiens
uuugcucugugcugacuguggu

SEQ ID NO: 4909 - RNA, 25 nt, Homo Sapiens
ugugugccaguacucaggcagcugg

SEQ ID NO: 4910 - RNA, 20 nt, Homo Sapiens
ugguggcagaggugggauga

SEQ ID NO: 4911 - RNA, 23 nt, Homo Sapiens
ugucugucuguuggccuguaucu

SEQ ID NO: 4912 - RNA, 28 nt, Homo Sapiens
ugcuucuucaggugagugcaggccaagg

SEQ ID NO: 4913 - RNA, 25 nt, Homo Sapiens
uggagagaagagaaggcagcagcag

SEQ ID NO: 4914 - RNA, 20 nt, Homo Sapiens
ucugucuguccugcuucuuc

SEQ ID NO: 4915 - RNA, 21 nt, Homo Sapiens
ucugcugggaacucccugacu

SEQ ID NO: 4916 - RNA, 26 nt, Homo Sapiens
uagccucuuucuugcguuucuuuuua

SEQ ID NO: 4917 - RNA, 24 nt, Homo Sapiens
aggaacccagcuagcuggccaggu

SEQ ID NO: 4918 - RNA, 27 nt, Homo Sapiens
aggagagagucuuaccuccccuggccc

SEQ ID NO: 4919 - RNA, 21 nt, Homo Sapiens
aaugggucucauuugagucuc

SEQ ID NO: 4920 - RNA, 16 nt, Homo Sapiens
auggggcagggcuggg

SEQ ID NO: 4921 - RNA, 22 nt, Homo Sapiens
ccagccaucugcacuuguacca

SEQ ID NO: 4922 - RNA, 25 nt, Homo Sapiens
ccaagcuucccugcaucuugguccu

SEQ ID NO: 4923 - RNA, 28 nt, Homo Sapiens
ccaagcuucccugcaucuugguccuugu

SEQ ID NO: 4924 - RNA, 27 nt, Homo Sapiens
caggcagcuggagagaagagaaggcag

SEQ ID NO: 4925 - RNA, 26 nt, Homo Sapiens
ccccauccaucugugucugucuguug

SEQ ID NO: 4926 - RNA, 27 nt, Homo Sapiens
cccucauucagcacuucugcugggaac

SEQ ID NO: 4927 - RNA, 23 nt, Homo Sapiens
ccauccaucugugucugucuguu

SEQ ID NO: 4928 - RNA, 23 nt, Homo Sapiens
ccagguggggaggggcuggggac

SEQ ID NO: 4929 - RNA, 22 nt, Homo Sapiens
cuggccgcgcgccuuuucucuc

SEQ ID NO: 4930 - RNA, 29 nt, Homo Sapiens
cuggagggggcgggggccguggcggcuuu

SEQ ID NO: 4931 - RNA, 23 nt, Homo Sapiens
cuucugcugggaacucccugacu

SEQ ID NO: 4932 - RNA, 27 nt, Homo Sapiens
cuuaccuccccuggcccuccuuucugg

SEQ ID NO: 4933 - RNA, 19 nt, Homo Sapiens
gaggggugacuucauccca

SEQ ID NO: 4934 - RNA, 22 nt, Homo Sapiens
gagagaagagaaggcagcagca

SEQ ID NO: 4935 - RNA, 21 nt, Homo Sapiens
cgcaggagagagucuuaccuc

SEQ ID NO: 4936 - RNA, 23 nt, Homo Sapiens
ccuccccuggcccuccuuucugg

SEQ ID NO: 4937 - RNA, 28 nt, Homo Sapiens
ccuccccuggcccuccuuucuggcucag

SEQ ID NO: 4938 - RNA, 23 nt, Homo Sapiens
gcuagcuggccagguggggaggg

SEQ ID NO: 4939 - RNA, 21 nt, Homo Sapiens
gccuucuguccugccugccca

SEQ ID NO: 4940 - RNA, 21 nt, Homo Sapiens
ggaggugggagaggauggggc

SEQ ID NO: 4941 - RNA, 24 nt, Homo Sapiens
ggagagaagagaaggcagcagcag

SEQ ID NO: 4942 - RNA, 23 nt, Homo Sapiens
gcugcaggaacccagcuagcugg

SEQ ID NO: 4943 - RNA, 30 nt, Homo Sapiens
gcugcaggaacccagcuagcuggccaggug

SEQ ID NO: 4944 - RNA, 23 nt, Homo Sapiens
guggggaggggcuggggaccggc

SEQ ID NO: 4945 - RNA, 19 nt, Homo Sapiens
gguggcagaggugggauga

SEQ ID NO: 4946 - RNA, 27 nt, Homo Sapiens
ggugauggggcagggcugggucucagu

SEQ ID NO: 4947 - RNA, 25 nt, Homo Sapiens
ggcggccccagcaccucagccugca

SEQ ID NO: 4948 - RNA, 23 nt, Homo Sapiens
gggaggcgggggcugcccuuggg

SEQ ID NO: 4949 - RNA, 21 nt, Homo Sapiens
gccugcacagugucccccagg

SEQ ID NO: 4950 - RNA, 27 nt, Homo Sapiens
gccccagguagaaacuuuuaucuauuc

SEQ ID NO: 4951 - RNA, 19 nt, Homo Sapiens
ccugcacuccucagggcag

SEQ ID NO: 4952 - RNA, 26 nt, Homo Sapiens
cgcagcccuggcagggggcaugcggu

SEQ ID NO: 4953 - RNA, 22 nt, Homo Sapiens
cggcccccugcccguucuugaa

SEQ ID NO: 4954 - RNA, 25 nt, Homo Sapiens
cgggcaggggcuggagggaggcggg

SEQ ID NO: 4955 - RNA, 27 nt, Homo Sapiens
gagacuugccagagccgggcacauuga

SEQ ID NO: 4956 - RNA, 21 nt, Homo Sapiens
cccagcaccucagccugcaca

SEQ ID NO: 4957 - RNA, 27 nt, Homo Sapiens
cccagcaccucagccugcacagugucc

SEQ ID NO: 4958 - RNA, 23 nt, Homo Sapiens
agggcagccucccccggcucuac

SEQ ID NO: 4959 - RNA, 30 nt, Homo Sapiens
auagaguguaguuuacagaaaaagacuuua

SEQ ID NO: 4960 - RNA, 22 nt, Homo Sapiens
aguuuacagaaaaagacuuuaa

SEQ ID NO: 4961 - RNA, 20 nt, Homo Sapiens
accucagccugcacaguguc

SEQ ID NO: 4962 - RNA, 27 nt, Homo Sapiens
acuguggcacuugccugggucacacac

SEQ ID NO: 4963 - RNA, 22 nt, Homo Sapiens
agaaaacaagcaaguucugaga

SEQ ID NO: 4964 - RNA, 26 nt, Homo Sapiens
aacugauuugcaauaaaaaugauacu

SEQ ID NO: 4965 - RNA, 27 nt, Homo Sapiens
aacugauuugcaauaaaaaugauacug

SEQ ID NO: 4966 - RNA, 20 nt, Homo Sapiens
aagcaaguucugagagccag

SEQ ID NO: 4967 - RNA, 19 nt, Homo Sapiens
uccagcaacacagccuggg

SEQ ID NO: 4968 - RNA, 22 nt, Homo Sapiens
ucugagaaaacaagcaaguucu

SEQ ID NO: 4969 - RNA, 23 nt, Homo Sapiens
ucuugaaauguaggcaucaugca

SEQ ID NO: 4970 - RNA, 21 nt, Homo Sapiens
guuuaaauaaaguaucaugca

SEQ ID NO: 4971 - RNA, 19 nt, Homo Sapiens
uugcucucuggccuuuucc

SEQ ID NO: 4972 - RNA, 21 nt, Homo Sapiens
acugugcugaauucugcaaug

SEQ ID NO: 4973 - RNA, 27 nt, Homo Sapiens
ccccucggagacgcucgcccgacagca

SEQ ID NO: 4974 - RNA, 24 nt, Homo Sapiens
gaaaugagacuugcucucuggccu

SEQ ID NO: 4975 - RNA, 28 nt, Homo Sapiens
gggaaaugagacuugcucucuggccuuu

SEQ ID NO: 4976 - RNA, 23 nt, Homo Sapiens
gugcugaauucugcaauguuuuc

SEQ ID NO: 4977 - RNA, 21 nt, Homo Sapiens
gguugcuugggccacugcccu

SEQ ID NO: 4978 - RNA, 22 nt, Homo Sapiens
gggcagcuucagucucugcagu

SEQ ID NO: 4979 - RNA, 22 nt, Homo Sapiens
gccccacccacccuccugggcc

SEQ ID NO: 4980 - RNA, 23 nt, Homo Sapiens
gccccuugcuucucaacuaaaga

SEQ ID NO: 4981 - RNA, 22 nt, Homo Sapiens
gcagcaccuggagcccacagag

SEQ ID NO: 4982 - RNA, 27 nt, Homo Sapiens
gcugucgucccccuccagugcuuggcu

SEQ ID NO: 4983 - RNA, 23 nt, Homo Sapiens
gcuggcagagguuucuagggugg

SEQ ID NO: 4984 - RNA, 20 nt, Homo Sapiens
ggagcaggaggaggaaaggu

SEQ ID NO: 4985 - RNA, 26 nt, Homo Sapiens
gagcaguuuuccaggaggccgggggg

SEQ ID NO: 4986 - RNA, 28 nt, Homo Sapiens
cuguuaacccuccaccuccucucuugga

SEQ ID NO: 4987 - RNA, 22 nt, Homo Sapiens
cguuuucuuugcugugccaaag

SEQ ID NO: 4988 - RNA, 20 nt, Homo Sapiens
cucccuccccaccccaacca

SEQ ID NO: 4989 - RNA, 22 nt, Homo Sapiens
ccuuggggaggggucagcucug

SEQ ID NO: 4990 - RNA, 22 nt, Homo Sapiens
ccuguuaacccuccaccuccuc

SEQ ID NO: 4991 - RNA, 25 nt, Homo Sapiens
ccuccccaccagucucacccacuag

SEQ ID NO: 4992 - RNA, 20 nt, Homo Sapiens
ccguccuccucgcugugcca

SEQ ID NO: 4993 - RNA, 20 nt, Homo Sapiens
ccccucccucugcucucaua

SEQ ID NO: 4994 - RNA, 22 nt, Homo Sapiens
cccucauuuaucacucugaccu

SEQ ID NO: 4995 - RNA, 27 nt, Homo Sapiens
cccucauuuaucacucugaccuucaca

SEQ ID NO: 4996 - RNA, 26 nt, Homo Sapiens
cccuccaccuccucucuuggacuccc

SEQ ID NO: 4997 - RNA, 20 nt, Homo Sapiens
cccacccuccugggcccagg

SEQ ID NO: 4998 - RNA, 27 nt, Homo Sapiens
ccauggcuggcagagguuucuagggug

SEQ ID NO: 4999 - RNA, 21 nt, Homo Sapiens
cccacaccaccguccuccucg

SEQ ID NO: 5000 - RNA, 22 nt, Homo Sapiens
cccacagagucuguguguagcc

SEQ ID NO: 5001 - RNA, 27 nt, Homo Sapiens
ccaggaggccggggggagcaggaggag

SEQ ID NO: 5002 - RNA, 25 nt, Homo Sapiens
caggcuguguguggggcccaagcau

SEQ ID NO: 5003 - RNA, 26 nt, Homo Sapiens
auggcuggcagagguuucuagggugg

SEQ ID NO: 5004 - RNA, 24 nt, Homo Sapiens
agaucugauuuauuuauuuugguu

SEQ ID NO: 5005 - RNA, 23 nt, Homo Sapiens
uucaucuugagccugagccuuag

SEQ ID NO: 5006 - RNA, 20 nt, Homo Sapiens
ucguuuucuuugcugugcca

SEQ ID NO: 5007 - RNA, 22 nt, Homo Sapiens
ugacugccccuugcuucucaac

SEQ ID NO: 5008 - RNA, 25 nt, Homo Sapiens
uggcuggcagagguuucuagggugg

SEQ ID NO: 5009 - RNA, 21 nt, Homo Sapiens
uggggaggggucagcucuggc

SEQ ID NO: 5010 - RNA, 26 nt, Homo Sapiens
ugggacaaguggggagcccaagaaag

SEQ ID NO: 5011 - RNA, 26 nt, Homo Sapiens
ugggauguguggcccagagguaagaa

SEQ ID NO: 5012 - RNA, 21 nt, Homo Sapiens
ugcuuuuguuaaaagcuuuau

SEQ ID NO: 5013 - RNA, 22 nt, Homo Sapiens
ugcuucacucucucauucuuag

SEQ ID NO: 5014 - RNA, 26 nt, Homo Sapiens
ucuggcuucuuucacuuugcauaauu

SEQ ID NO: 5015 - RNA, 22 nt, Homo Sapiens
ugcacacaaucuagcaggaauc

SEQ ID NO: 5016 - RNA, 22 nt, Homo Sapiens
uccaucaucccucaaaguguca

SEQ ID NO: 5017 - RNA, 21 nt, Homo Sapiens
uccacccacucuucacaggcu

SEQ ID NO: 5018 - RNA, 21 nt, Homo Sapiens
guucuuguuagaaucauggga

SEQ ID NO: 5019 - RNA, 29 nt, Homo Sapiens
uaccacuuccugaaucaguuauuauuucu

SEQ ID NO: 5020 - RNA, 22 nt, Homo Sapiens
uugcuuuuguuaaaagcuuuau

SEQ ID NO: 5021 - RNA, 22 nt, Homo Sapiens
uuuaguuuugggauauuacaaa

SEQ ID NO: 5022 - RNA, 22 nt, Homo Sapiens
agaacauggagaacuugcucaa

SEQ ID NO: 5023 - RNA, 23 nt, Homo Sapiens
agaacuccuuugcagaaacuggg

SEQ ID NO: 5024 - RNA, 21 nt, Homo Sapiens
aacugugguccaucuccagac

SEQ ID NO: 5025 - RNA, 22 nt, Homo Sapiens
aacaaacuaagccagguaugca

SEQ ID NO: 5026 - RNA, 20 nt, Homo Sapiens
cacuuccugaaucaguuauu

SEQ ID NO: 5027 - RNA, 20 nt, Homo Sapiens
ccaucaucccucaaaguguc

SEQ ID NO: 5028 - RNA, 25 nt, Homo Sapiens
cgaaaucaagaaacucauguucuua

SEQ ID NO: 5029 - RNA, 22 nt, Homo Sapiens
cuguaagcuaauccacaaccug

SEQ ID NO: 5030 - RNA, 23 nt, Homo Sapiens
gcuucacucucucauucuuagcu

SEQ ID NO: 5031 - RNA, 25 nt, Homo Sapiens
ggcucuggaagaaaaggaaaaaguc

SEQ ID NO: 5032 - RNA, 22 nt, Homo Sapiens
gguccaucuccagacucuacca

SEQ ID NO: 5033 - RNA, 24 nt, Homo Sapiens
gucuggcuucuuucacuuugcaua

SEQ ID NO: 5034 - RNA, 24 nt, Homo Sapiens
gucugggaaaaagugcacgugaag

SEQ ID NO: 5035 - RNA, 19 nt, Homo Sapiens
gucccaagcuucccugcca

SEQ ID NO: 5036 - RNA, 21 nt, Homo Sapiens
gggggcccuuccagauugggg

SEQ ID NO: 5037 - RNA, 26 nt, Homo Sapiens
gaggcucccagacccagggcagugug

SEQ ID NO: 5038 - RNA, 27 nt, Homo Sapiens
gagggaagauggcggacgaggagaagc

SEQ ID NO: 5039 - RNA, 24 nt, Homo Sapiens
cacacaguauuuauuguucccaca

SEQ ID NO: 5040 - RNA, 22 nt, Homo Sapiens
ucacccccaauuaaacccagaa

SEQ ID NO: 5041 - RNA, 22 nt, Homo Sapiens
ucauccaauccucacugggugg

SEQ ID NO: 5042 - RNA, 25 nt, Homo Sapiens
ugcaugggcucgaagggagagccag

SEQ ID NO: 5043 - RNA, 19 nt, Homo Sapiens
ucuggacugaagccugcag

SEQ ID NO: 5044 - RNA, 25 nt, Homo Sapiens
ugguugagaaaugaauaauuuccca

SEQ ID NO: 5045 - RNA, 25 nt, Homo Sapiens
uguguguguauguuugcacacuugu

SEQ ID NO: 5046 - RNA, 20 nt, Homo Sapiens
ugugcaugggcucgaaggga

SEQ ID NO: 5047 - RNA, 21 nt, Homo Sapiens
agguuauaggucacuccuggg

SEQ ID NO: 5048 - RNA, 20 nt, Homo Sapiens
agugaucaauaaaaugugau

SEQ ID NO: 5049 - RNA, 23 nt, Homo Sapiens
aaagggcagggcaucuccugugc

SEQ ID NO: 5050 - RNA, 21 nt, Homo Sapiens
aagugaucaauaaaaugugau

SEQ ID NO: 5051 - RNA, 19 nt, Homo Sapiens
agaugucccuuucuuggcc

SEQ ID NO: 5052 - RNA, 19 nt, Homo Sapiens
agagacacuaacgacuuca

SEQ ID NO: 5053 - RNA, 26 nt, Homo Sapiens
acuggguggggugaggaccacuccuu

SEQ ID NO: 5054 - RNA, 27 nt, Homo Sapiens
acuggguggggugaggaccacuccuua

SEQ ID NO: 5055 - RNA, 20 nt, Homo Sapiens
accugugaccagcacugucu

SEQ ID NO: 5056 - RNA, 22 nt, Homo Sapiens
ccugugaccagcacugucucag

SEQ ID NO: 5057 - RNA, 25 nt, Homo Sapiens
ccucuggccaggauggagggguggu

SEQ ID NO: 5058 - RNA, 20 nt, Homo Sapiens
gucucaguuucacuuucaca

SEQ ID NO: 5059 - RNA, 23 nt, Homo Sapiens
ggagagguuauaggucacuccug

SEQ ID NO: 5060 - RNA, 17 nt, Homo Sapiens
gcccagucccuggagcu

SEQ ID NO: 5061 - RNA, 21 nt, Homo Sapiens
ccugcucccagccucuugcuc

SEQ ID NO: 5062 - RNA, 27 nt, Homo Sapiens
ccugcucccagccucuugcucagagcu

SEQ ID NO: 5063 - RNA, 26 nt, Homo Sapiens
aggacuagcuggaggaacccaguggg

SEQ ID NO: 5064 - RNA, 22 nt, Homo Sapiens
aacauagugucugcugcugccu

SEQ ID NO: 5065 - RNA, 23 nt, Homo Sapiens
ccccugagugggcugggcccucu

SEQ ID NO: 5066 - RNA, 16 nt, Homo Sapiens
ucuccacccuccggcc

SEQ ID NO: 5067 - RNA, 27 nt, Homo Sapiens
uagcccagucccuggagcuguccuuca

SEQ ID NO: 5068 - RNA, 26 nt, Homo Sapiens
uaguuuuucacuuuagcaaaggggca

SEQ ID NO: 5069 - RNA, 20 nt, Homo Sapiens
uauuaucauuucuccuuuaa

SEQ ID NO: 5070 - RNA, 22 nt, Homo Sapiens
gugugagccaccacgcccugcc

SEQ ID NO: 5071 - RNA, 18 nt, Homo Sapiens
gugugugccaucaugccu

SEQ ID NO: 5072 - RNA, 22 nt, Homo Sapiens
guugcccaggcuggagugcaac

SEQ ID NO: 5073 - RNA, 23 nt, Homo Sapiens
guugcccaggcuggagugcaacg

SEQ ID NO: 5074 - RNA, 27 nt, Homo Sapiens
guugcccaggcuggagugcaacggcau

SEQ ID NO: 5075 - RNA, 22 nt, Homo Sapiens
guugcccaggcuggagugcagu

SEQ ID NO: 5076 - RNA, 23 nt, Homo Sapiens
guugcccaggcuggagugcagug

SEQ ID NO: 5077 - RNA, 21 nt, Homo Sapiens
ucuccgucacuccauucucag

SEQ ID NO: 5078 - RNA, 23 nt, Homo Sapiens
ucucauucuguugcccaggcugg

SEQ ID NO: 5079 - RNA, 27 nt, Homo Sapiens
ucuagaucagagagcaagaaaaaagua

SEQ ID NO: 5080 - RNA, 21 nt, Homo Sapiens
uccaguuuuuugccacugcaa

SEQ ID NO: 5081 - RNA, 22 nt, Homo Sapiens
uccgaguagcugggauuacagg

SEQ ID NO: 5082 - RNA, 18 nt, Homo Sapiens
uggaacaacagcuaucua

SEQ ID NO: 5083 - RNA, 20 nt, Homo Sapiens
ucugccucccaggcucaagc

SEQ ID NO: 5084 - RNA, 23 nt, Homo Sapiens
ucuugaacuccugaccucaggug

SEQ ID NO: 5085 - RNA, 28 nt, Homo Sapiens
ucuugaacuccugaccucaggugaucca

SEQ ID NO: 5086 - RNA, 22 nt, Homo Sapiens
ucuguugcccaggcuggagugc

SEQ ID NO: 5087 - RNA, 21 nt, Homo Sapiens
ucuguuuuaaauuuaaaacaa

SEQ ID NO: 5088 - RNA, 21 nt, Homo Sapiens
ucuuagagguagguguauucc

SEQ ID NO: 5089 - RNA, 22 nt, Homo Sapiens
ugaacuccugaccucaggugau

SEQ ID NO: 5090 - RNA, 23 nt, Homo Sapiens
ugcagccucugccucccaggcuc

SEQ ID NO: 5091 - RNA, 24 nt, Homo Sapiens
ugagccaccacgcccugccuacuc

SEQ ID NO: 5092 - RNA, 20 nt, Homo Sapiens
ugcccaggcuggagugcaac

SEQ ID NO: 5093 - RNA, 22 nt, Homo Sapiens
ugcccaggcuggagugcaacgg

SEQ ID NO: 5094 - RNA, 20 nt, Homo Sapiens
ugcccaggcuggagugcagu

SEQ ID NO: 5095 - RNA, 22 nt, Homo Sapiens
ugcccaggcuggagugcagugg

SEQ ID NO: 5096 - RNA, 22 nt, Homo Sapiens
uguugcccaggcuggagugcaa

SEQ ID NO: 5097 - RNA, 23 nt, Homo Sapiens
uguugcccaggcuggagugcaac

SEQ ID NO: 5098 - RNA, 22 nt, Homo Sapiens
uguugcccaggcuggagugcag

SEQ ID NO: 5099 - RNA, 23 nt, Homo Sapiens
uguugcccaggcuggagugcagu

SEQ ID NO: 5100 - RNA, 21 nt, Homo Sapiens
uguuggccaggcuggucucga

SEQ ID NO: 5101 - RNA, 18 nt, Homo Sapiens
uugcccaggcuggagugc

SEQ ID NO: 5102 - RNA, 21 nt, Homo Sapiens
uugcccaggcuggagugcaac

SEQ ID NO: 5103 - RNA, 22 nt, Homo Sapiens
uugcccaggcuggagugcaacg

SEQ ID NO: 5104 - RNA, 27 nt, Homo Sapiens
uugcccaggcuggagugcaacggcaug

SEQ ID NO: 5105 - RNA, 22 nt, Homo Sapiens
uugcccaggcuggagugcagug

SEQ ID NO: 5106 - RNA, 27 nt, Homo Sapiens
uugcccaggcuggagugcaguggcgug

SEQ ID NO: 5107 - RNA, 21 nt, Homo Sapiens
uuuaguuuuucacuuuagcaa

SEQ ID NO: 5108 - RNA, 21 nt, Homo Sapiens
uuguugcccaggcuggagugc

SEQ ID NO: 5109 - RNA, 26 nt, Homo Sapiens
uuggaacaacagcuaucuagauagcu

SEQ ID NO: 5110 - RNA, 19 nt, Homo Sapiens
cccaggcuggagugcagug

SEQ ID NO: 5111 - RNA, 22 nt, Homo Sapiens
cccaaagugcugggauuacagg

SEQ ID NO: 5112 - RNA, 22 nt, Homo Sapiens
cccaaguaggugggauuacagg

SEQ ID NO: 5113 - RNA, 27 nt, Homo Sapiens
ccaggaggcuggcaguacagagugcag

SEQ ID NO: 5114 - RNA, 22 nt, Homo Sapiens
caggcuggagugcaguggcgug

SEQ ID NO: 5115 - RNA, 27 nt, Homo Sapiens
caggcuggagugcaguggcgugaucuu

SEQ ID NO: 5116 - RNA, 20 nt, Homo Sapiens
caggcuggagugcaacggca

SEQ ID NO: 5117 - RNA, 23 nt, Homo Sapiens
cagccuuacacugggcacaugga

SEQ ID NO: 5118 - RNA, 22 nt, Homo Sapiens
ccaaguaggugggauuacaggu

SEQ ID NO: 5119 - RNA, 24 nt, Homo Sapiens
caugauuuuggcucacugcagccu

SEQ ID NO: 5120 - RNA, 22 nt, Homo Sapiens
ccaaagugcugggauuacaggu

SEQ ID NO: 5121 - RNA, 26 nt, Homo Sapiens
agucucucauuucuuucaagacagcc

SEQ ID NO: 5122 - RNA, 23 nt, Homo Sapiens
aggugcccaccaccaagcccugc

SEQ ID NO: 5123 - RNA, 23 nt, Homo Sapiens
aggcuggagugcaacggcaugau

SEQ ID NO: 5124 - RNA, 23 nt, Homo Sapiens
aggcuggagugcaguggcgugau

SEQ ID NO: 5125 - RNA, 24 nt, Homo Sapiens
aggcuccaccuuaacugugcucag

SEQ ID NO: 5126 - RNA, 22 nt, Homo Sapiens
aguggcgugaucuuggcucacu

SEQ ID NO: 5127 - RNA, 18 nt, Homo Sapiens
aguguuugcuguuucccc

SEQ ID NO: 5128 - RNA, 22 nt, Homo Sapiens
cagauacacaagugagggcuuu

SEQ ID NO: 5129 - RNA, 22 nt, Homo Sapiens
cagagcugucuggugaucacuu

SEQ ID NO: 5130 - RNA, 18 nt, Homo Sapiens
auguuggccaggcugguc

SEQ ID NO: 5131 - RNA, 22 nt, Homo Sapiens
augauuuuggcucacugcagcc

SEQ ID NO: 5132 - RNA, 25 nt, Homo Sapiens
auuugcguauguaaacauucauauu

SEQ ID NO: 5133 - RNA, 27 nt, Homo Sapiens
aacagccuuacacugggcacauggagg

SEQ ID NO: 5134 - RNA, 22 nt, Homo Sapiens
aacggcaugauuuuggcucacu

SEQ ID NO: 5135 - RNA, 21 nt, Homo Sapiens
aagaaagagaaaguacucaga

SEQ ID NO: 5136 - RNA, 19 nt, Homo Sapiens
aaagugacaugaaaauuac

SEQ ID NO: 5137 - RNA, 22 nt, Homo Sapiens
aaagugcugggauuacaggugu

SEQ ID NO: 5138 - RNA, 29 nt, Homo Sapiens
aaacccacgcguguucugaaggugcccag

SEQ ID NO: 5139 - RNA, 22 nt, Homo Sapiens
agccuuccgaguagcugggauu

SEQ ID NO: 5140 - RNA, 24 nt, Homo Sapiens
agcuccauguuuagaaauaaauga

SEQ ID NO: 5141 - RNA, 20 nt, Homo Sapiens
agagacaguguuuugccaug

SEQ ID NO: 5142 - RNA, 23 nt, Homo Sapiens
agcaggaguugauacaccaccuu

SEQ ID NO: 5143 - RNA, 22 nt, Homo Sapiens
acuacaaccuccaccuuccagg

SEQ ID NO: 5144 - RNA, 20 nt, Homo Sapiens
acucuuguugcccaggcugg

SEQ ID NO: 5145 - RNA, 21 nt, Homo Sapiens
acucagaggcugacacugaca

SEQ ID NO: 5146 - RNA, 22 nt, Homo Sapiens
ccgaguagcugggauuacaggu

SEQ ID NO: 5147 - RNA, 26 nt, Homo Sapiens
ccucaggugauccacccaccugggcc

SEQ ID NO: 5148 - RNA, 22 nt, Homo Sapiens
cgaacuccugacaucaggugau

SEQ ID NO: 5149 - RNA, 23 nt, Homo Sapiens
cgaguagcugggauuacaggugu

SEQ ID NO: 5150 - RNA, 22 nt, Homo Sapiens
cuccagagagagccaagguucu

SEQ ID NO: 5151 - RNA, 22 nt, Homo Sapiens
cucggccucccaaagugcuggg

SEQ ID NO: 5152 - RNA, 22 nt, Homo Sapiens
cucuuuggaacaacagcuaucu

SEQ ID NO: 5153 - RNA, 26 nt, Homo Sapiens
cucugccucccaggcucaagcacuuu

SEQ ID NO: 5154 - RNA, 22 nt, Homo Sapiens
cucauccucccaaguagguggg

SEQ ID NO: 5155 - RNA, 22 nt, Homo Sapiens
gaguagcugggauuacaggugu

SEQ ID NO: 5156 - RNA, 22 nt, Homo Sapiens
gaacuccugacaucaggugauc

SEQ ID NO: 5157 - RNA, 22 nt, Homo Sapiens
gaacuccugaccucaggugauc

SEQ ID NO: 5158 - RNA, 23 nt, Homo Sapiens
gacaggguuucaccauguuggcc

SEQ ID NO: 5159 - RNA, 21 nt, Homo Sapiens
gacuaauuuuguauuuuuagu

SEQ ID NO: 5160 - RNA, 21 nt, Homo Sapiens
cugccucccaggcucaagcac

SEQ ID NO: 5161 - RNA, 24 nt, Homo Sapiens
cugccucccaggcucaagcacuuu

SEQ ID NO: 5162 - RNA, 24 nt, Homo Sapiens
cuguugcccaggcuggagugcagu

SEQ ID NO: 5163 - RNA, 22 nt, Homo Sapiens
cuucugcuuccacgguccuguu

SEQ ID NO: 5164 - RNA, 25 nt, Homo Sapiens
gcccaggcuggagugcaguggcgug

SEQ ID NO: 5165 - RNA, 22 nt, Homo Sapiens
gcccaggcuggagugcaguggc

SEQ ID NO: 5166 - RNA, 25 nt, Homo Sapiens
gcaugauuuuggcucacugcagccu

SEQ ID NO: 5167 - RNA, 20 nt, Homo Sapiens
gcaggaugugccuguggcau

SEQ ID NO: 5168 - RNA, 24 nt, Homo Sapiens
gccacucucagagacucccaggag

SEQ ID NO: 5169 - RNA, 22 nt, Homo Sapiens
gcccaggcuggagugcaacggc

SEQ ID NO: 5170 - RNA, 24 nt, Homo Sapiens
gcccaggcuggagugcaacggcau

SEQ ID NO: 5171 - RNA, 25 nt, Homo Sapiens
gcccaggcuggagugcaacggcaug

SEQ ID NO: 5172 - RNA, 19 nt, Homo Sapiens
gcccaggcuggagugcagu

SEQ ID NO: 5173 - RNA, 23 nt, Homo Sapiens
ggaguuguugaacuauauuugga

SEQ ID NO: 5174 - RNA, 17 nt, Homo Sapiens
ggaacaacagcuaucua

SEQ ID NO: 5175 - RNA, 24 nt, Homo Sapiens
gcugaguuuaguuuuucacuuuag

SEQ ID NO: 5176 - RNA, 23 nt, Homo Sapiens
gcucaaguugaugaaucaugggg

SEQ ID NO: 5177 - RNA, 22 nt, Homo Sapiens
gcucacugcagccucugccucc

SEQ ID NO: 5178 - RNA, 22 nt, Homo Sapiens
gucuugaacuccugaccucagg

SEQ ID NO: 5179 - RNA, 22 nt, Homo Sapiens
gucucgaacuccugacaucagg

SEQ ID NO: 5180 - RNA, 19 nt, Homo Sapiens
gugcccaggagcggcgaug

SEQ ID NO: 5181 - RNA, 20 nt, Homo Sapiens
gggguggaauaaaggcugag

SEQ ID NO: 5182 - RNA, 22 nt, Homo Sapiens
ggucucgaacuccugacaucag

SEQ ID NO: 5183 - RNA, 22 nt, Homo Sapiens
ggucuugaacuccugaccucag

SEQ ID NO: 5184 - RNA, 18 nt, Homo Sapiens
gguuuucugcucugucca

SEQ ID NO: 5185 - RNA, 23 nt, Homo Sapiens
ggcuccaccuuaacugugcucag

SEQ ID NO: 5186 - RNA, 21 nt, Homo Sapiens
ggcucacugcagccucugccu

SEQ ID NO: 5187 - RNA, 22 nt, Homo Sapiens
ggcucacugcagccucugccuc

SEQ ID NO: 5188 - RNA, 23 nt, Homo Sapiens
ggcucacugcagccucugccucc

SEQ ID NO: 5189 - RNA, 23 nt, Homo Sapiens
ggcccagaaaucauacuguaagg

SEQ ID NO: 5190 - RNA, 22 nt, Homo Sapiens
ggccucccauagugcugggauu

SEQ ID NO: 5191 - RNA, 22 nt, Homo Sapiens
ggccucccaaagugcugggauu

SEQ ID NO: 5192 - RNA, 24 nt, Homo Sapiens
gggacugugcagcucgaggcucca

SEQ ID NO: 5193 - RNA, 19 nt, Homo Sapiens
ggcuucugaauuauucugg

SEQ ID NO: 5194 - RNA, 22 nt, Homo Sapiens
gggauuacaggugcccaccacc

SEQ ID NO: 5195 - RNA, 22 nt, Homo Sapiens
gggauuacaggugugagccacc

SEQ ID NO: 5196 - RNA, 25 nt, Homo Sapiens
gggauuacaggugugugccaucaug

SEQ ID NO: 5197 - RNA, 20 nt, Homo Sapiens
gggcuacacagcagcuguuc

SEQ ID NO: 5198 - RNA, 23 nt, Homo Sapiens
ggcuaaaacaaaucucagaacag

SEQ ID NO: 5199 - RNA, 27 nt, Homo Sapiens
guaauuaaaaaauggucagugugcaaa

SEQ ID NO: 5200 - RNA, 21 nt, Homo Sapiens
gucaccuagcagauauguauu

SEQ ID NO: 5201 - RNA, 27 nt, Homo Sapiens
gucaccuagcagauauguauuacuuuu

SEQ ID NO: 5202 - RNA, 22 nt, Homo Sapiens
cggauaggcuaaucaauacccu

SEQ ID NO: 5203 - RNA, 24 nt, Homo Sapiens
cuccucuccucacgaccgaggcag

SEQ ID NO: 5204 - RNA, 23 nt, Homo Sapiens
agaccugagaugcuggucaagcc

SEQ ID NO: 5205 - RNA, 26 nt, Homo Sapiens
agcccuuuuagugguggugucucacu

SEQ ID NO: 5206 - RNA, 26 nt, Homo Sapiens
agcucuguguguaccgagaacugggg

SEQ ID NO: 5207 - RNA, 26 nt, Homo Sapiens
augugggaaacccuuuugcguggucc

SEQ ID NO: 5208 - RNA, 17 nt, Homo Sapiens
agguuggagaugacaga

SEQ ID NO: 5209 - RNA, 21 nt, Homo Sapiens
aguaugggcuacacagcagcu

SEQ ID NO: 5210 - RNA, 22 nt, Homo Sapiens
caguaugggcuacacagcagcu

SEQ ID NO: 5211 - RNA, 23 nt, Homo Sapiens
uugggaugcaggcucagcccgcu

SEQ ID NO: 5212 - RNA, 21 nt, Homo Sapiens
uugccuggauaccucuggcuc

SEQ ID NO: 5213 - RNA, 22 nt, Homo Sapiens
uuccuguuuucaccaucuuucu

SEQ ID NO: 5214 - RNA, 26 nt, Homo Sapiens
uguuuagagcaguuaacaucugaagu

SEQ ID NO: 5215 - RNA, 23 nt, Homo Sapiens
uaacagcaaauaaccauugguua

SEQ ID NO: 5216 - RNA, 23 nt, Homo Sapiens
uaaagaagaguaaaauggcuguu

SEQ ID NO: 5217 - RNA, 21 nt, Homo Sapiens
ucagaccuucuuccacagcaa

SEQ ID NO: 5218 - RNA, 16 nt, Homo Sapiens
ucauucuucucuccca

SEQ ID NO: 5219 - RNA, 27 nt, Homo Sapiens
ucuagggucuuacucuuuguaugauga

SEQ ID NO: 5220 - RNA, 28 nt, Homo Sapiens
ucuacuuugccacagauuaucuuguaca

SEQ ID NO: 5221 - RNA, 19 nt, Homo Sapiens
uccucauucuucucuccca

SEQ ID NO: 5222 - RNA, 21 nt, Homo Sapiens
ucugaacuggaguggaguagg

SEQ ID NO: 5223 - RNA, 23 nt, Homo Sapiens
ugagggacgaggucaaggagaua

SEQ ID NO: 5224 - RNA, 28 nt, Homo Sapiens
ugguugguaaagccucagcaacagccag

SEQ ID NO: 5225 - RNA, 19 nt, Homo Sapiens
uggugaagacccagaggaa

SEQ ID NO: 5226 - RNA, 23 nt, Homo Sapiens
uggggaauggagaggugggcagg

SEQ ID NO: 5227 - RNA, 26 nt, Homo Sapiens
ugugaggaagagcaggcaccagcagc

SEQ ID NO: 5228 - RNA, 25 nt, Homo Sapiens
ugugucccucggugcagaaacuacc

SEQ ID NO: 5229 - RNA, 23 nt, Homo Sapiens
uuccaagucuuccugaccaccuu

SEQ ID NO: 5230 - RNA, 20 nt, Homo Sapiens
uuugcugcugcuucccucuc

SEQ ID NO: 5231 - RNA, 19 nt, Homo Sapiens
uuucuucuuugacuauaac

SEQ ID NO: 5232 - RNA, 25 nt, Homo Sapiens
caggcagcuccgggguccgcgguuu

SEQ ID NO: 5233 - RNA, 20 nt, Homo Sapiens
cagccaguaaggcagcucug

SEQ ID NO: 5234 - RNA, 22 nt, Homo Sapiens
ccaccuugcacuauuggacuuu

SEQ ID NO: 5235 - RNA, 24 nt, Homo Sapiens
agguacugugaggaagagcaggca

SEQ ID NO: 5236 - RNA, 22 nt, Homo Sapiens
aguggaggcugggaugggugag

SEQ ID NO: 5237 - RNA, 26 nt, Homo Sapiens
aguggaggcugggaugggugagagaa

SEQ ID NO: 5238 - RNA, 27 nt, Homo Sapiens
auccuuuuuaaaugagacuuguuuucc

SEQ ID NO: 5239 - RNA, 21 nt, Homo Sapiens
cagauuaucuuguacagccuu

SEQ ID NO: 5240 - RNA, 20 nt, Homo Sapiens
cagaauggggaauggagagg

SEQ ID NO: 5241 - RNA, 22 nt, Homo Sapiens
cacguugaaaaucaacccaaua

SEQ ID NO: 5242 - RNA, 21 nt, Homo Sapiens
caccuugcacuauuggacuuu

SEQ ID NO: 5243 - RNA, 26 nt, Homo Sapiens
acuugccccagaugccuccucugucc

SEQ ID NO: 5244 - RNA, 23 nt, Homo Sapiens
agagcaggcaccagcagcagaau

SEQ ID NO: 5245 - RNA, 25 nt, Homo Sapiens
acgauuucacugacacugcgaacuc

SEQ ID NO: 5246 - RNA, 25 nt, Homo Sapiens
aacuggaguggaguaggagaaagag

SEQ ID NO: 5247 - RNA, 20 nt, Homo Sapiens
cuccgcgccucacgccccgg

SEQ ID NO: 5248 - RNA, 20 nt, Homo Sapiens
cucuuccaaucuccaucacc

SEQ ID NO: 5249 - RNA, 24 nt, Homo Sapiens
cggaacucuucaucuuaaacuaca

SEQ ID NO: 5250 - RNA, 21 nt, Homo Sapiens
cucagguuccaaauucaguaa

SEQ ID NO: 5251 - RNA, 20 nt, Homo Sapiens
cucaagcacugacacucauu

SEQ ID NO: 5252 - RNA, 27 nt, Homo Sapiens
cuauagaaaacgauuuugaacauacuu

SEQ ID NO: 5253 - RNA, 22 nt, Homo Sapiens
ccugcugucagaccuucuucca

SEQ ID NO: 5254 - RNA, 27 nt, Homo Sapiens
ccugcugucagaccuucuuccacagca

SEQ ID NO: 5255 - RNA, 21 nt, Homo Sapiens
cuucccuuugauuuuuugcug

SEQ ID NO: 5256 - RNA, 25 nt, Homo Sapiens
gagguacugugaggaagagcaggca

SEQ ID NO: 5257 - RNA, 21 nt, Homo Sapiens
gaggaagagcaggcaccagca

SEQ ID NO: 5258 - RNA, 21 nt, Homo Sapiens
gcaacuggugaaacuccgcgc

SEQ ID NO: 5259 - RNA, 29 nt, Homo Sapiens
gucacaggacgauuucacugacacugcga

SEQ ID NO: 5260 - RNA, 18 nt, Homo Sapiens
ggugaagacccagaggaa

SEQ ID NO: 5261 - RNA, 25 nt, Homo Sapiens
gugaggaagagcaggcaccagcagc

SEQ ID NO: 5262 - RNA, 22 nt, Homo Sapiens
gugacucuuguguuugcugcug

SEQ ID NO: 5263 - RNA, 21 nt, Homo Sapiens
guggaggcugggaugggugag

SEQ ID NO: 5264 - RNA, 20 nt, Homo Sapiens
gugauugccauuucuuccca

SEQ ID NO: 5265 - RNA, 23 nt, Homo Sapiens
gucugaacuggaguggaguagga

SEQ ID NO: 5266 - RNA, 22 nt, Homo Sapiens
ggcagggguuccagcuucccuu

SEQ ID NO: 5267 - RNA, 23 nt, Homo Sapiens
ggcaccagcagcagaauggggaa

SEQ ID NO: 5268 - RNA, 27 nt, Homo Sapiens
ggggucugaucuuucuccuuggucggg

SEQ ID NO: 5269 - RNA, 20 nt, Homo Sapiens
gggaaaugcuguuugcucga

SEQ ID NO: 5270 - RNA, 19 nt, Homo Sapiens
gcauugccagcucuuccaa

SEQ ID NO: 5271 - RNA, 25 nt, Homo Sapiens
gcauugccagcucuuccaaucucca

SEQ ID NO: 5272 - RNA, 28 nt, Homo Sapiens
gcagaauggggaauggagaggugggcag

SEQ ID NO: 5273 - RNA, 27 nt, Homo Sapiens
gcacugacacucauuaccgucugugau

SEQ ID NO: 5274 - RNA, 22 nt, Homo Sapiens
gccgucugaacuggaguggagu

SEQ ID NO: 5275 - RNA, 22 nt, Homo Sapiens
gcuaugcucacauucauggccu

SEQ ID NO: 5276 - RNA, 23 nt, Homo Sapiens
gcucuggcuggagaggaaaagcc

SEQ ID NO: 5277 - RNA, 18 nt, Homo Sapiens
gcuuuguccaugaugucc

SEQ ID NO: 5278 - RNA, 28 nt, Homo Sapiens
ggagagugaugugagggagcugugugac

SEQ ID NO: 5279 - RNA, 23 nt, Homo Sapiens
ggagcaggcauuuccagcaguga

SEQ ID NO: 5280 - RNA, 21 nt, Homo Sapiens
gagcuaaagugacuuuuccca

SEQ ID NO: 5281 - RNA, 26 nt, Homo Sapiens
gaagcaagcuauuggagcugaaggaa

SEQ ID NO: 5282 - RNA, 21 nt, Homo Sapiens
cugugugaccauagaaaguga

SEQ ID NO: 5283 - RNA, 27 nt, Homo Sapiens
ccuggcaccugggugcucuggcuggag

SEQ ID NO: 5284 - RNA, 25 nt, Homo Sapiens
cgcuuuggggagcgccucgcuucac

SEQ ID NO: 5285 - RNA, 25 nt, Homo Sapiens
agcauccggcaugagggcugagaug

SEQ ID NO: 5286 - RNA, 22 nt, Homo Sapiens
agaaacugaggccacagagcua

SEQ ID NO: 5287 - RNA, 25 nt, Homo Sapiens
cacaggcugcaagcugcagggaauu

SEQ ID NO: 5288 - RNA, 19 nt, Homo Sapiens
caaguguccgggauucaga

SEQ ID NO: 5289 - RNA, 20 nt, Homo Sapiens
ccaaguguccgggauucaga

SEQ ID NO: 5290 - RNA, 19 nt, Homo Sapiens
uuggugaggaggaggcaga

SEQ ID NO: 5291 - RNA, 24 nt, Homo Sapiens
uucucagacgucaggagagugaug

SEQ ID NO: 5292 - RNA, 23 nt, Homo Sapiens
ugggacuucucagacgucaggag

SEQ ID NO: 5293 - RNA, 21 nt, Homo Sapiens
uccagcagugaggagacagcc

SEQ ID NO: 5294 - RNA, 23 nt, Homo Sapiens
uacugaugaagaaacugaggcca

SEQ ID NO: 5295 - RNA, 21 nt, Homo Sapiens
ucuaggguuuucuuucauuuu

SEQ ID NO: 5296 - RNA, 20 nt, Homo Sapiens
ugucccuucccagcgcugcu

SEQ ID NO: 5297 - RNA, 21 nt, Homo Sapiens
uguauaugaaucaaaacaaac

SEQ ID NO: 5298 - RNA, 20 nt, Homo Sapiens
ugccuaggauguucugggcu

SEQ ID NO: 5299 - RNA, 23 nt, Homo Sapiens
auccuagugcgggaccccgccuc

SEQ ID NO: 5300 - RNA, 24 nt, Homo Sapiens
agggugacagggacacaacauggc

SEQ ID NO: 5301 - RNA, 20 nt, Homo Sapiens
aauuuggggcaggaaauacu

SEQ ID NO: 5302 - RNA, 20 nt, Homo Sapiens
cgagcaggcauuucugugau

SEQ ID NO: 5303 - RNA, 21 nt, Homo Sapiens
cuuuuccguccagugucggca

SEQ ID NO: 5304 - RNA, 23 nt, Homo Sapiens
ggagcgccaucaugucuuaccag

SEQ ID NO: 5305 - RNA, 25 nt, Homo Sapiens
gggccaggccugggugaucugcugc

SEQ ID NO: 5306 - RNA, 19 nt, Homo Sapiens
ggggugagacaaggaagag

SEQ ID NO: 5307 - RNA, 26 nt, Homo Sapiens
ggggugagacaaggaagaggaugucu

SEQ ID NO: 5308 - RNA, 22 nt, Homo Sapiens
guaagcugacuggccccaggga

SEQ ID NO: 5309 - RNA, 20 nt, Homo Sapiens
gcccugcaagggcguggugg

SEQ ID NO: 5310 - RNA, 20 nt, Homo Sapiens
cuguucuuuaaaugcguucc

SEQ ID NO: 5311 - RNA, 23 nt, Homo Sapiens
aauccgagccagcucugggggcu

SEQ ID NO: 5312 - RNA, 26 nt, Homo Sapiens
aggaagaggaugucugagcuggagaa

SEQ ID NO: 5313 - RNA, 20 nt, Homo Sapiens
aaggagaccaggaaggggug

SEQ ID NO: 5314 - RNA, 22 nt, Homo Sapiens
cacuaccgggggcucugagcca

SEQ ID NO: 5315 - RNA, 27 nt, Homo Sapiens
auucuuucugcuauauuaggccugugu

SEQ ID NO: 5316 - RNA, 27 nt, Homo Sapiens
auuugaaaacacugcuguucuuuaaau

SEQ ID NO: 5317 - RNA, 19 nt, Homo Sapiens
cagccguguuguagcuaau

SEQ ID NO: 5318 - RNA, 26 nt, Homo Sapiens
ucuuucugcuauauuaggccugugug

SEQ ID NO: 5319 - RNA, 31 nt, Homo Sapiens
ucuuucugcuauauuaggccuguguguaagc

SEQ ID NO: 5320 - RNA, 20 nt, Homo Sapiens
uguagcuaauuaggaagcuu

SEQ ID NO: 5321 - RNA, 27 nt, Homo Sapiens
uauccagcauuauuugaaaacacugcu

SEQ ID NO: 5322 - RNA, 20 nt, Homo Sapiens
ugaagcucucacacgcacag

SEQ ID NO: 5323 - RNA, 20 nt, Homo Sapiens
cagucuggaggguccuggcc

SEQ ID NO: 5324 - RNA, 22 nt, Homo Sapiens
cauguguggcccugucugcuua

SEQ ID NO: 5325 - RNA, 21 nt, Homo Sapiens
cccauggacucuucagucugg

SEQ ID NO: 5326 - RNA, 21 nt, Homo Sapiens
auguguggcccugucugcuua

SEQ ID NO: 5327 - RNA, 21 nt, Homo Sapiens
aguaggaacuuggaaugcaag

SEQ ID NO: 5328 - RNA, 19 nt, Homo Sapiens
gaagcucucacacgcacag

SEQ ID NO: 5329 - RNA, 23 nt, Homo Sapiens
ccugugcaccguaguggccaugg

SEQ ID NO: 5330 - RNA, 23 nt, Homo Sapiens
cucuucagucuggaggguccugg

SEQ ID NO: 5331 - RNA, 22 nt, Homo Sapiens
gcccauggacucuucagucugg

SEQ ID NO: 5332 - RNA, 21 nt, Homo Sapiens
ggaccuccauuccacucaucu

SEQ ID NO: 5333 - RNA, 20 nt, Homo Sapiens
cuccacccguucugccucag

SEQ ID NO: 5334 - RNA, 21 nt, Homo Sapiens
cuccucucuguccugccucag

SEQ ID NO: 5335 - RNA, 24 nt, Homo Sapiens
cuaaccuuugagaucacucagcuc

SEQ ID NO: 5336 - RNA, 21 nt, Homo Sapiens
ccuuguucccagugcugucaa

SEQ ID NO: 5337 - RNA, 22 nt, Homo Sapiens
ccucucuguccugccucaggcc

SEQ ID NO: 5338 - RNA, 22 nt, Homo Sapiens
ccucuccacccguucugccuca

SEQ ID NO: 5339 - RNA, 16 nt, Homo Sapiens
gcacccacaccccccg

SEQ ID NO: 5340 - RNA, 23 nt, Homo Sapiens
aucuccagggacucucaggcuaa

SEQ ID NO: 5341 - RNA, 26 nt, Homo Sapiens
auugccucucagggguagugaagcug

SEQ ID NO: 5342 - RNA, 22 nt, Homo Sapiens
cccugcuccucucuguccugcc

SEQ ID NO: 5343 - RNA, 20 nt, Homo Sapiens
ccaucuccuuucagaaaaau

SEQ ID NO: 5344 - RNA, 27 nt, Homo Sapiens
aggaacccugcuccucucuguccugcc

SEQ ID NO: 5345 - RNA, 25 nt, Homo Sapiens
ugccucaggccuaagaagcacucuc

SEQ ID NO: 5346 - RNA, 30 nt, Homo Sapiens
ugcuccucucuguccugccucaggccuaag

SEQ ID NO: 5347 - RNA, 17 nt, Homo Sapiens
ucuccacccguucugcc

SEQ ID NO: 5348 - RNA, 27 nt, Homo Sapiens
ucuccagggacucucaggcuaaccuuu

SEQ ID NO: 5349 - RNA, 30 nt, Homo Sapiens
uccuuuaucuccagggacucucaggcuaac

SEQ ID NO: 5350 - RNA, 22 nt, Homo Sapiens
ucagggguagugaagcugcaga

SEQ ID NO: 5351 - RNA, 21 nt, Homo Sapiens
uuacucguccccgccauucca

SEQ ID NO: 5352 - RNA, 21 nt, Homo Sapiens
uucuccacaaccuccuccucc

SEQ ID NO: 5353 - RNA, 20 nt, Homo Sapiens
ucagugucauuuacuaacca

SEQ ID NO: 5354 - RNA, 32 nt, Homo Sapiens
ucagugucauuuacuaaccagcaggauggaga

SEQ ID NO: 5355 - RNA, 22 nt, Homo Sapiens
uagaaccuucuaauccaugugc

SEQ ID NO: 5356 - RNA, 27 nt, Homo Sapiens
uagaaccuucuaauccaugugcugcug

SEQ ID NO: 5357 - RNA, 27 nt, Homo Sapiens
aggccuccagccacuuauuuccaugga

SEQ ID NO: 5358 - RNA, 29 nt, Homo Sapiens
agacucaaggccuccagccacuuauuucc

SEQ ID NO: 5359 - RNA, 23 nt, Homo Sapiens
acccuaucaucaguuaggauuag

SEQ ID NO: 5360 - RNA, 23 nt, Homo Sapiens
aagcacccagagaucaauuggga

SEQ ID NO: 5361 - RNA, 22 nt, Homo Sapiens
cccuaucaucaguuaggauuag

SEQ ID NO: 5362 - RNA, 24 nt, Homo Sapiens
caguucugaugaggcacgccugcc

SEQ ID NO: 5363 - RNA, 23 nt, Homo Sapiens
auuuuggacgugugaggaugugg

SEQ ID NO: 5364 - RNA, 24 nt, Homo Sapiens
caaccuccuccuccaguucugaug

SEQ ID NO: 5365 - RNA, 20 nt, Homo Sapiens
aucaagucugugaaagucuc

SEQ ID NO: 5366 - RNA, 25 nt, Homo Sapiens
auauucccaugguagacugugacac

SEQ ID NO: 5367 - RNA, 26 nt, Homo Sapiens
ggagagaacagggaugcuaucucgcu

SEQ ID NO: 5368 - RNA, 19 nt, Homo Sapiens
gccuccagccacuuauuuc

SEQ ID NO: 5369 - RNA, 24 nt, Homo Sapiens
ggcacgccugccuucuccccucca

SEQ ID NO: 5370 - RNA, 24 nt, Homo Sapiens
gcccccacucagcauuucggugcu

SEQ ID NO: 5371 - RNA, 28 nt, Homo Sapiens
gccuuuuauuaacauauauuguuauuuu

SEQ ID NO: 5372 - RNA, 22 nt, Homo Sapiens
gccauuugaagaaggaggaauu

SEQ ID NO: 5373 - RNA, 21 nt, Homo Sapiens
gcuguuguucagaaguuguua

SEQ ID NO: 5374 - RNA, 20 nt, Homo Sapiens
cuguuguucagaaguuguua

SEQ ID NO: 5375 - RNA, 20 nt, Homo Sapiens
cuucccuuucacugaaguga

SEQ ID NO: 5376 - RNA, 27 nt, Homo Sapiens
cgaaccugaagccuagaaauaucuuug

SEQ ID NO: 5377 - RNA, 20 nt, Homo Sapiens
aguaucuguaccugccccca

SEQ ID NO: 5378 - RNA, 20 nt, Homo Sapiens
augcuguaccuuucugacaa

SEQ ID NO: 5379 - RNA, 22 nt, Homo Sapiens
accugaagccuagaaauaucuu

SEQ ID NO: 5380 - RNA, 22 nt, Homo Sapiens
ucagcauuucggugcuucccuu

SEQ ID NO: 5381 - RNA, 23 nt, Homo Sapiens
ucggaauucccugaagcaacacu

SEQ ID NO: 5382 - RNA, 27 nt, Homo Sapiens
ugcuguuguucagaaguuguuagugau

SEQ ID NO: 5383 - RNA, 18 nt, Homo Sapiens
ugcccccacucagcauuu

SEQ ID NO: 5384 - RNA, 22 nt, Homo Sapiens
uuccuuaaguggcugugauuaa

SEQ ID NO: 5385 - RNA, 24 nt, Homo Sapiens
uuaagaacugacacaaaggacaaa

SEQ ID NO: 5386 - RNA, 21 nt, Homo Sapiens
uuuaauugagccuuuuauuaa

SEQ ID NO: 5387 - RNA, 22 nt, Homo Sapiens
uuuucucucacugaugcccuuu

SEQ ID NO: 5388 - RNA, 26 nt, Homo Sapiens
uggaaagagaaccaugaaaacaaugc

SEQ ID NO: 5389 - RNA, 26 nt, Homo Sapiens
uacagcauaaagcacauugcugagcc

SEQ ID NO: 5390 - RNA, 24 nt, Homo Sapiens
uuuuucugucauuucuacuuuuug

SEQ ID NO: 5391 - RNA, 25 nt, Homo Sapiens
acagcauaaagcacauugcugagcc

SEQ ID NO: 5392 - RNA, 26 nt, Homo Sapiens
agaguguuuuuucugucauuucuacu

SEQ ID NO: 5393 - RNA, 19 nt, Homo Sapiens
aggaaagaauaaggcagca

SEQ ID NO: 5394 - RNA, 17 nt, Homo Sapiens
aauaucaggaugccuua

SEQ ID NO: 5395 - RNA, 19 nt, Homo Sapiens
cauugcugagccagaguca

SEQ ID NO: 5396 - RNA, 19 nt, Homo Sapiens
cagcacaauucugucccug

SEQ ID NO: 5397 - RNA, 23 nt, Homo Sapiens
cgcagccgccgcuccauccccag

SEQ ID NO: 5398 - RNA, 22 nt, Homo Sapiens
ccggggcauggacagggccagg

SEQ ID NO: 5399 - RNA, 22 nt, Homo Sapiens
gcaacccccucggagccugugu

SEQ ID NO: 5400 - RNA, 28 nt, Homo Sapiens
uccuguuccacuccggccuuccuagcgg

SEQ ID NO: 5401 - RNA, 26 nt, Homo Sapiens
ugagccagaggcguagggcccaggag

SEQ ID NO: 5402 - RNA, 26 nt, Homo Sapiens
ucuuccuuccgcucugaggcaacccc

SEQ ID NO: 5403 - RNA, 19 nt, Homo Sapiens
ucugucccugucccugccc

SEQ ID NO: 5404 - RNA, 25 nt, Homo Sapiens
ugcgagcuccguccugccugcagca

SEQ ID NO: 5405 - RNA, 25 nt, Homo Sapiens
gagacuaagggcuacaggccagcgu

SEQ ID NO: 5406 - RNA, 31 nt, Homo Sapiens
cugcgagcuccguccugccugcagcagcaca

SEQ ID NO: 5407 - RNA, 21 nt, Homo Sapiens
cugcugcaccaaccucacugc

SEQ ID NO: 5408 - RNA, 26 nt, Homo Sapiens
ccugcgagcuccguccugccugcagc

SEQ ID NO: 5409 - RNA, 22 nt, Homo Sapiens
ccugugcugcugcaccaaccuc

SEQ ID NO: 5410 - RNA, 27 nt, Homo Sapiens
cugaguauguuaagcucuuuaugacug

SEQ ID NO: 5411 - RNA, 19 nt, Homo Sapiens
uuguagcauuucuugaugu

SEQ ID NO: 5412 - RNA, 22 nt, Homo Sapiens
ugaugggaauugugugauguuu

SEQ ID NO: 5413 - RNA, 23 nt, Homo Sapiens
ucugcagcuguuuuaguuaaauu

SEQ ID NO: 5414 - RNA, 19 nt, Homo Sapiens
ugcuagucgggcuuggggg

SEQ ID NO: 5415 - RNA, 23 nt, Homo Sapiens
ugggaauugugugauguuuaaca

SEQ ID NO: 5416 - RNA, 27 nt, Homo Sapiens
uggaggaguccaggccauggaggcaga

SEQ ID NO: 5417 - RNA, 19 nt, Homo Sapiens
uggaggcagaauccuggcc

SEQ ID NO: 5418 - RNA, 26 nt, Homo Sapiens
uaguugagcaaagggguccucacguu

SEQ ID NO: 5419 - RNA, 21 nt, Homo Sapiens
cugagagcugggcagggggga

SEQ ID NO: 5420 - RNA, 21 nt, Homo Sapiens
cuggggcagccaagaacgagc

SEQ ID NO: 5421 - RNA, 27 nt, Homo Sapiens
cugggagggagggguccuccagcagaa

SEQ ID NO: 5422 - RNA, 21 nt, Homo Sapiens
gagagcgagaccugggaggga

SEQ ID NO: 5423 - RNA, 24 nt, Homo Sapiens
gcugccucugggaagucugcagua

SEQ ID NO: 5424 - RNA, 18 nt, Homo Sapiens
gcugcugcuggucugacu

SEQ ID NO: 5425 - RNA, 22 nt, Homo Sapiens
ggaaggagccaggauggccugg

SEQ ID NO: 5426 - RNA, 26 nt, Homo Sapiens
ggaggaguccaggccauggaggcaga

SEQ ID NO: 5427 - RNA, 22 nt, Homo Sapiens
gccaggauggccugggcucuga

SEQ ID NO: 5428 - RNA, 19 nt, Homo Sapiens
ggcugcugcuggucugacu

SEQ ID NO: 5429 - RNA, 27 nt, Homo Sapiens
gggagagagcgagaccugggagggagg

SEQ ID NO: 5430 - RNA, 22 nt, Homo Sapiens
caguucugcagcuguuuuaguu

SEQ ID NO: 5431 - RNA, 26 nt, Homo Sapiens
ccaguggcugcuccuuccuucaccuc

SEQ ID NO: 5432 - RNA, 22 nt, Homo Sapiens
aguccaggccauggaggcagaa

SEQ ID NO: 5433 - RNA, 24 nt, Homo Sapiens
aggucugcaagaaccugacucguc

SEQ ID NO: 5434 - RNA, 28 nt, Homo Sapiens
aucauacugaaguagagugcggcguuuc

SEQ ID NO: 5435 - RNA, 25 nt, Homo Sapiens
aaggucugcaagaaccugacucguc

SEQ ID NO: 5436 - RNA, 22 nt, Homo Sapiens
acagagcagugcuagucgggcu

SEQ ID NO: 5437 - RNA, 24 nt, Homo Sapiens
acaggaagaucuuaaauuuuguga

SEQ ID NO: 5438 - RNA, 22 nt, Homo Sapiens
accagccuggguaacauaguga

SEQ ID NO: 5439 - RNA, 21 nt, Homo Sapiens
aauguacaccuguggucccag

SEQ ID NO: 5440 - RNA, 22 nt, Homo Sapiens
acgccuguaauccuagcacuuu

SEQ ID NO: 5441 - RNA, 22 nt, Homo Sapiens
acuauuccuuugcccggcauca

SEQ ID NO: 5442 - RNA, 22 nt, Homo Sapiens
aggaaccugcuuuaguggggga

SEQ ID NO: 5443 - RNA, 22 nt, Homo Sapiens
agaccagccuggguaacauagu

SEQ ID NO: 5444 - RNA, 25 nt, Homo Sapiens
auccuagcacuuuugggaggcagag

SEQ ID NO: 5445 - RNA, 20 nt, Homo Sapiens
agugagacccuaucucuaca

SEQ ID NO: 5446 - RNA, 19 nt, Homo Sapiens
aggcuaaggugggaggauc

SEQ ID NO: 5447 - RNA, 27 nt, Homo Sapiens
auuccuuugcccggcaucaaggcacag

SEQ ID NO: 5448 - RNA, 22 nt, Homo Sapiens
cacgccuguaauccuagcacuu

SEQ ID NO: 5449 - RNA, 25 nt, Homo Sapiens
caccacugcgcccuucucccugagg

SEQ ID NO: 5450 - RNA, 18 nt, Homo Sapiens
ccauagcaacacucugag

SEQ ID NO: 5451 - RNA, 27 nt, Homo Sapiens
ccaggcauuugagaccagccuggguaa

SEQ ID NO: 5452 - RNA, 31 nt, Homo Sapiens
ccaggcauuugagaccagccuggguaacaua

SEQ ID NO: 5453 - RNA, 26 nt, Homo Sapiens
cccaccaggaaccugcuuuagugggg

SEQ ID NO: 5454 - RNA, 26 nt, Homo Sapiens
ccauuuuaaagguugaggaaacaagc

SEQ ID NO: 5455 - RNA, 25 nt, Homo Sapiens
cccugaggagccucagcuuucccuc

SEQ ID NO: 5456 - RNA, 26 nt, Homo Sapiens
caggcauuugagaccagccuggguaa

SEQ ID NO: 5457 - RNA, 20 nt, Homo Sapiens
gggaggaguuccugcccacc

SEQ ID NO: 5458 - RNA, 17 nt, Homo Sapiens
ggccucggcccggagcg

SEQ ID NO: 5459 - RNA, 23 nt, Homo Sapiens
ggugcucacgccuguaauccuag

SEQ ID NO: 5460 - RNA, 22 nt, Homo Sapiens
gguccaagccuccccuccacca

SEQ ID NO: 5461 - RNA, 22 nt, Homo Sapiens
gccacugcggggaggaggggga

SEQ ID NO: 5462 - RNA, 23 nt, Homo Sapiens
gccuguaauccuagcacuuuugg

SEQ ID NO: 5463 - RNA, 26 nt, Homo Sapiens
gccuguaauccuagcacuuuugggag

SEQ ID NO: 5464 - RNA, 21 nt, Homo Sapiens
gcccuucucccugaggagccu

SEQ ID NO: 5465 - RNA, 22 nt, Homo Sapiens
ggaggcuaaggugggaggauca

SEQ ID NO: 5466 - RNA, 26 nt, Homo Sapiens
ggaggaaggagucgccgaggagcagc

SEQ ID NO: 5467 - RNA, 23 nt, Homo Sapiens
gcugggagccggaggcgcgggga

SEQ ID NO: 5468 - RNA, 22 nt, Homo Sapiens
gcucacgccuguaauccuagca

SEQ ID NO: 5469 - RNA, 26 nt, Homo Sapiens
gagacacccccgguccaagccucccc

SEQ ID NO: 5470 - RNA, 22 nt, Homo Sapiens
gaccagccuggguaacauagug

SEQ ID NO: 5471 - RNA, 27 nt, Homo Sapiens
gcaccuugggcacuguugaagugccuu

SEQ ID NO: 5472 - RNA, 26 nt, Homo Sapiens
cugggagccggaggcgcggggaccuc

SEQ ID NO: 5473 - RNA, 24 nt, Homo Sapiens
cugccuccuccugccugucugcac

SEQ ID NO: 5474 - RNA, 23 nt, Homo Sapiens
cucucugccuccuccugccuguc

SEQ ID NO: 5475 - RNA, 18 nt, Homo Sapiens
cuccuccugccugucugc

SEQ ID NO: 5476 - RNA, 22 nt, Homo Sapiens
cuccuccugccugucugcacua

SEQ ID NO: 5477 - RNA, 22 nt, Homo Sapiens
cuccugagcccccgcgcauccu

SEQ ID NO: 5478 - RNA, 24 nt, Homo Sapiens
cgcugggagccggaggcgcgggga

SEQ ID NO: 5479 - RNA, 21 nt, Homo Sapiens
cgccuguaauccuagcacuuu

SEQ ID NO: 5480 - RNA, 22 nt, Homo Sapiens
cgccuguaauccuagcacuuuu

SEQ ID NO: 5481 - RNA, 22 nt, Homo Sapiens
ccuguaauccuagcacuuuugg

SEQ ID NO: 5482 - RNA, 23 nt, Homo Sapiens
ccucucugccuccuccugccugu

SEQ ID NO: 5483 - RNA, 22 nt, Homo Sapiens
uaacauagugagacccuaucuc

SEQ ID NO: 5484 - RNA, 21 nt, Homo Sapiens
uccuccugccugucugcacua

SEQ ID NO: 5485 - RNA, 25 nt, Homo Sapiens
uccaggcauuugagaccagccuggg

SEQ ID NO: 5486 - RNA, 20 nt, Homo Sapiens
uggaggcuaaggugggagga

SEQ ID NO: 5487 - RNA, 22 nt, Homo Sapiens
ugggagccggaggcgcggggac

SEQ ID NO: 5488 - RNA, 24 nt, Homo Sapiens
ucugccuccuccugccugucugca

SEQ ID NO: 5489 - RNA, 23 nt, Homo Sapiens
ugcggggaggagggggaggagga

SEQ ID NO: 5490 - RNA, 21 nt, Homo Sapiens
uugggaggcagagaugggagg

SEQ ID NO: 5491 - RNA, 27 nt, Homo Sapiens
ugucauugucuguccccacccggucgu

SEQ ID NO: 5492 - RNA, 22 nt, Homo Sapiens
ucuccucucugggaaacguccc

SEQ ID NO: 5493 - RNA, 20 nt, Homo Sapiens
cggcugucuugccucuuguc

SEQ ID NO: 5494 - RNA, 21 nt, Homo Sapiens
gcggcugucuugccucuuguc

SEQ ID NO: 5495 - RNA, 24 nt, Homo Sapiens
gcacugcgacugcccagucuggcc

SEQ ID NO: 5496 - RNA, 23 nt, Homo Sapiens
gguggaaggagggagggagccgc

SEQ ID NO: 5497 - RNA, 28 nt, Homo Sapiens
gguggaaggagggagggagccgcaggcg

SEQ ID NO: 5498 - RNA, 21 nt, Homo Sapiens
ggcacagugccugggacuggc

SEQ ID NO: 5499 - RNA, 27 nt, Homo Sapiens
ggcacagugccugggacuggcagggug

SEQ ID NO: 5500 - RNA, 28 nt, Homo Sapiens
ggggcaggcucuggcacagugccuggga

SEQ ID NO: 5501 - RNA, 21 nt, Homo Sapiens
gcuccccaggggaguuguguc

SEQ ID NO: 5502 - RNA, 24 nt, Homo Sapiens
ggaccuuaggccuuccucucucca

SEQ ID NO: 5503 - RNA, 25 nt, Homo Sapiens
ccuggccucugugccuucuuuugau

SEQ ID NO: 5504 - RNA, 21 nt, Homo Sapiens
ccuuaggccuuccucucucca

SEQ ID NO: 5505 - RNA, 20 nt, Homo Sapiens
cuggaaucuggagaccaggg

SEQ ID NO: 5506 - RNA, 27 nt, Homo Sapiens
cuucccaaacgccuccccugccccaau

SEQ ID NO: 5507 - RNA, 20 nt, Homo Sapiens
cuuaggccuuccucucucca

SEQ ID NO: 5508 - RNA, 21 nt, Homo Sapiens
cuugagacacggagcccagcc

SEQ ID NO: 5509 - RNA, 26 nt, Homo Sapiens
gagaauugggggcuuagggucggaac

SEQ ID NO: 5510 - RNA, 23 nt, Homo Sapiens
gaccuuaggccuuccucucucca

SEQ ID NO: 5511 - RNA, 21 nt, Homo Sapiens
cccucagcaaggacagcagag

SEQ ID NO: 5512 - RNA, 26 nt, Homo Sapiens
cccucucuccccuggaaaggacacca

SEQ ID NO: 5513 - RNA, 27 nt, Homo Sapiens
ccagcucccucuauuuauguuugcacu

SEQ ID NO: 5514 - RNA, 21 nt, Homo Sapiens
cacuggggccuacagcuuuga

SEQ ID NO: 5515 - RNA, 21 nt, Homo Sapiens
agugcuggcaaccacuaagaa

SEQ ID NO: 5516 - RNA, 28 nt, Homo Sapiens
aggaauguguggccugcacagugaagug

SEQ ID NO: 5517 - RNA, 22 nt, Homo Sapiens
acucacuggggccuacagcuuu

SEQ ID NO: 5518 - RNA, 21 nt, Homo Sapiens
accuuaggccuuccucucucc

SEQ ID NO: 5519 - RNA, 27 nt, Homo Sapiens
uccacccucucuccccuggaaaggaca

SEQ ID NO: 5520 - RNA, 23 nt, Homo Sapiens
ugcuggcaaccacuaagaauuca

SEQ ID NO: 5521 - RNA, 22 nt, Homo Sapiens
uuccuugagacacggagcccag

SEQ ID NO: 5522 - RNA, 22 nt, Homo Sapiens
uggcuccaacacugcugcucca

SEQ ID NO: 5523 - RNA, 27 nt, Homo Sapiens
ucccgacgaucuuccuggcuccaacac

SEQ ID NO: 5524 - RNA, 20 nt, Homo Sapiens
uccuggcuccaacacugcug

SEQ ID NO: 5525 - RNA, 21 nt, Homo Sapiens
ucacccaggaggauggcaaag

SEQ ID NO: 5526 - RNA, 27 nt, Homo Sapiens
ucacccaggaggauggcaaagagaguc

SEQ ID NO: 5527 - RNA, 20 nt, Homo Sapiens
acaggagaccuggcacugga

SEQ ID NO: 5528 - RNA, 20 nt, Homo Sapiens
agugggcugcacccacccag

SEQ ID NO: 5529 - RNA, 26 nt, Homo Sapiens
aguuugagacaggagaccuggcacug

SEQ ID NO: 5530 - RNA, 26 nt, Homo Sapiens
cccgacgaucuuccuggcuccaacac

SEQ ID NO: 5531 - RNA, 19 nt, Homo Sapiens
caggagaccuggcacugga

SEQ ID NO: 5532 - RNA, 22 nt, Homo Sapiens
caggagagacagugaggcugca

SEQ ID NO: 5533 - RNA, 23 nt, Homo Sapiens
gagacaggagaccuggcacugga

SEQ ID NO: 5534 - RNA, 20 nt, Homo Sapiens
gcgugagggugaggggcugg

SEQ ID NO: 5535 - RNA, 27 nt, Homo Sapiens
ggggcaggggagucagcagaggccucg

SEQ ID NO: 5536 - RNA, 21 nt, Homo Sapiens
ggcuccaacacugcugcucca

SEQ ID NO: 5537 - RNA, 30 nt, Homo Sapiens
ggugaggggcuggcacugacugggcauagc

SEQ ID NO: 5538 - RNA, 21 nt, Homo Sapiens
gucacccaggaggauggcaaa

SEQ ID NO: 5539 - RNA, 27 nt, Homo Sapiens
gucacccaggaggauggcaaagagagu

SEQ ID NO: 5540 - RNA, 21 nt, Homo Sapiens
ggucacccaggaggauggcaa

SEQ ID NO: 5541 - RNA, 26 nt, Homo Sapiens
gugaaaaacaacaaauucaguucuga

SEQ ID NO: 5542 - RNA, 24 nt, Homo Sapiens
gugacacacagguguucaaagacg

SEQ ID NO: 5543 - RNA, 26 nt, Homo Sapiens
ggcaagacugcccuuagaaauucuag

SEQ ID NO: 5544 - RNA, 16 nt, Homo Sapiens
gcguaugacacauuga

SEQ ID NO: 5545 - RNA, 25 nt, Homo Sapiens
gccagcccuggcugcccaggcggag

SEQ ID NO: 5546 - RNA, 23 nt, Homo Sapiens
gacgcuucuggggagugagggaa

SEQ ID NO: 5547 - RNA, 23 nt, Homo Sapiens
gacaauguccaagacacagcaga

SEQ ID NO: 5548 - RNA, 24 nt, Homo Sapiens
cuuugccaccucuccauuuuugcc

SEQ ID NO: 5549 - RNA, 21 nt, Homo Sapiens
cugcccuuagaaauucuagcc

SEQ ID NO: 5550 - RNA, 18 nt, Homo Sapiens
cuggcucaaaacuaccua

SEQ ID NO: 5551 - RNA, 25 nt, Homo Sapiens
cgcaagagugacacacagguguuca

SEQ ID NO: 5552 - RNA, 24 nt, Homo Sapiens
auguccaagacacagcagaacaga

SEQ ID NO: 5553 - RNA, 21 nt, Homo Sapiens
augcagaaagcacagaaagga

SEQ ID NO: 5554 - RNA, 21 nt, Homo Sapiens
auguaaacugugaagauaguu

SEQ ID NO: 5555 - RNA, 26 nt, Homo Sapiens
auggaaagaaagaagcguaugacaca

SEQ ID NO: 5556 - RNA, 27 nt, Homo Sapiens
auggaaagaaagaagcguaugacacau

SEQ ID NO: 5557 - RNA, 21 nt, Homo Sapiens
auuuaaauaaggcucuaccuc

SEQ ID NO: 5558 - RNA, 22 nt, Homo Sapiens
acaauguccaagacacagcaga

SEQ ID NO: 5559 - RNA, 19 nt, Homo Sapiens
uccucaaggacauuacuag

SEQ ID NO: 5560 - RNA, 23 nt, Homo Sapiens
ucucaggcaucaaaagcauuuug

SEQ ID NO: 5561 - RNA, 26 nt, Homo Sapiens
uccaaggauguuuaaaaucuaguugg

SEQ ID NO: 5562 - RNA, 25 nt, Homo Sapiens
ugggugaagagaaaggaaguacaga

SEQ ID NO: 5563 - RNA, 24 nt, Homo Sapiens
ucuuucucaggcaucaaaagcauu

SEQ ID NO: 5564 - RNA, 26 nt, Homo Sapiens
uugggugaagagaaaggaaguacaga

SEQ ID NO: 5565 - RNA, 25 nt, Homo Sapiens
uuuccacccugucccuaucucuacc

SEQ ID NO: 5566 - RNA, 21 nt, Homo Sapiens
uucaguuuuguuucuuugcgu

SEQ ID NO: 5567 - RNA, 26 nt, Homo Sapiens
ucagugaagaugcagaagggaaaugg

SEQ ID NO: 5568 - RNA, 23 nt, Homo Sapiens
auuacaggucacaugaaaccaaa

SEQ ID NO: 5569 - RNA, 27 nt, Homo Sapiens
aguucucuucuuuccacccugucccua

SEQ ID NO: 5570 - RNA, 24 nt, Homo Sapiens
auccagagaguccuaugaaaagac

SEQ ID NO: 5571 - RNA, 32 nt, Homo Sapiens
cagguugaauucugaguaaacagcagauaacu

SEQ ID NO: 5572 - RNA, 22 nt, Homo Sapiens
caugaaaccaaaacgggcccug

SEQ ID NO: 5573 - RNA, 21 nt, Homo Sapiens
cggacaguuauucauucucuu

SEQ ID NO: 5574 - RNA, 20 nt, Homo Sapiens
cuaugaaaagacaaggccau

SEQ ID NO: 5575 - RNA, 20 nt, Homo Sapiens
cuccuuauggagaacuauuu

SEQ ID NO: 5576 - RNA, 21 nt, Homo Sapiens
cucugccagaagauaccauuu

SEQ ID NO: 5577 - RNA, 23 nt, Homo Sapiens
cuugcaggcugugguggagcuga

SEQ ID NO: 5578 - RNA, 26 nt, Homo Sapiens
gcagaagggaaauggggagccucagc

SEQ ID NO: 5579 - RNA, 25 nt, Homo Sapiens
ggagaacuauuuauuauacacucca

SEQ ID NO: 5580 - RNA, 24 nt, Homo Sapiens
ggcugugguggagcugacgcuggg

SEQ ID NO: 5581 - RNA, 22 nt, Homo Sapiens
ggcugugugacggcugccugaa

SEQ ID NO: 5582 - RNA, 22 nt, Homo Sapiens
gggcacugucugaacuccugac

SEQ ID NO: 5583 - RNA, 29 nt, Homo Sapiens
gggagggagcucuuucucuggcccugcag

SEQ ID NO: 5584 - RNA, 25 nt, Homo Sapiens
gggcagcaggccugguugcagcugg

SEQ ID NO: 5585 - RNA, 24 nt, Homo Sapiens
ggccccagccaagggacacaucuc

SEQ ID NO: 5586 - RNA, 32 nt, Homo Sapiens
ggccuggcuggcucuucugugcuuuccacaaa

SEQ ID NO: 5587 - RNA, 26 nt, Homo Sapiens
ggcgguggagacuucccugugcggug

SEQ ID NO: 5588 - RNA, 25 nt, Homo Sapiens
gugccucaacauggagccuugccug

SEQ ID NO: 5589 - RNA, 21 nt, Homo Sapiens
gucugaacuccugacugucag

SEQ ID NO: 5590 - RNA, 24 nt, Homo Sapiens
ggucaaggugacccgggaggagag

SEQ ID NO: 5591 - RNA, 25 nt, Homo Sapiens
gcuggcgugggggucucagaaugga

SEQ ID NO: 5592 - RNA, 22 nt, Homo Sapiens
gcuggcucuucugugcuuucca

SEQ ID NO: 5593 - RNA, 26 nt, Homo Sapiens
gcagaagcucucccucccuacucccu

SEQ ID NO: 5594 - RNA, 19 nt, Homo Sapiens
gcagcugggaacaugugca

SEQ ID NO: 5595 - RNA, 24 nt, Homo Sapiens
gcagcugggaacaugugcaggcug

SEQ ID NO: 5596 - RNA, 22 nt, Homo Sapiens
gccaggaugcaggcauccacau

SEQ ID NO: 5597 - RNA, 21 nt, Homo Sapiens
gcgagcuggagagaggacugu

SEQ ID NO: 5598 - RNA, 23 nt, Homo Sapiens
cuugccuggccugggcuaggggc

SEQ ID NO: 5599 - RNA, 23 nt, Homo Sapiens
cugcagaugaccucaugaacugg

SEQ ID NO: 5600 - RNA, 22 nt, Homo Sapiens
cugccuggccacugagcacugg

SEQ ID NO: 5601 - RNA, 26 nt, Homo Sapiens
cugccuggccacugagcacuggccga

SEQ ID NO: 5602 - RNA, 27 nt, Homo Sapiens
cugccuggccacugagcacuggccgag

SEQ ID NO: 5603 - RNA, 21 nt, Homo Sapiens
gaggugccucaacauggagcc

SEQ ID NO: 5604 - RNA, 22 nt, Homo Sapiens
cucucuagccacccccuugucc

SEQ ID NO: 5605 - RNA, 20 nt, Homo Sapiens
cugacacguccagggccagg

SEQ ID NO: 5606 - RNA, 20 nt, Homo Sapiens
cucacgcagcugggaacaug

SEQ ID NO: 5607 - RNA, 27 nt, Homo Sapiens
cggcuccaguccauagacguucccccc

SEQ ID NO: 5608 - RNA, 24 nt, Homo Sapiens
cggugagcuuccugcagccugugg

SEQ ID NO: 5609 - RNA, 21 nt, Homo Sapiens
ccuggccaggacucaggcugu

SEQ ID NO: 5610 - RNA, 26 nt, Homo Sapiens
ccuggccaggacucaggcuguuccug

SEQ ID NO: 5611 - RNA, 17 nt, Homo Sapiens
ccugcagccccucagcc

SEQ ID NO: 5612 - RNA, 20 nt, Homo Sapiens
ccaagacauuaaaucugcca

SEQ ID NO: 5613 - RNA, 20 nt, Homo Sapiens
cccaggccugucaagagacg

SEQ ID NO: 5614 - RNA, 25 nt, Homo Sapiens
cccugccacucuccccaagagggcc

SEQ ID NO: 5615 - RNA, 22 nt, Homo Sapiens
cccaaguuucuccucugaccca

SEQ ID NO: 5616 - RNA, 22 nt, Homo Sapiens
cccagccaagggacacaucuca

SEQ ID NO: 5617 - RNA, 26 nt, Homo Sapiens
agggcagcaggccugguugcagcugg

SEQ ID NO: 5618 - RNA, 21 nt, Homo Sapiens
agucugcugcagaugaccuca

SEQ ID NO: 5619 - RNA, 19 nt, Homo Sapiens
augcaggcauccacaugcc

SEQ ID NO: 5620 - RNA, 23 nt, Homo Sapiens
cacuacugcugugcccucaggcu

SEQ ID NO: 5621 - RNA, 26 nt, Homo Sapiens
accaugucgcuggcagcuggugcugg

SEQ ID NO: 5622 - RNA, 20 nt, Homo Sapiens
agccucaucuuccugucucu

SEQ ID NO: 5623 - RNA, 24 nt, Homo Sapiens
aagcucucccucccuacucccugg

SEQ ID NO: 5624 - RNA, 26 nt, Homo Sapiens
ucucuagccacccccuuguccccagu

SEQ ID NO: 5625 - RNA, 22 nt, Homo Sapiens
uccucucagaacaucagccuca

SEQ ID NO: 5626 - RNA, 19 nt, Homo Sapiens
ucaacauggagccuugccu

SEQ ID NO: 5627 - RNA, 27 nt, Homo Sapiens
ucugaucuauuucaccaaccaccccau

SEQ ID NO: 5628 - RNA, 26 nt, Homo Sapiens
ugcagccuguggauguccugcagccc

SEQ ID NO: 5629 - RNA, 23 nt, Homo Sapiens
uggagagaggacuguccugaggg

SEQ ID NO: 5630 - RNA, 21 nt, Homo Sapiens
uucuccucugacccaucagcu

SEQ ID NO: 5631 - RNA, 23 nt, Homo Sapiens
uuacucugcacuauagccauuug

SEQ ID NO: 5632 - RNA, 28 nt, Homo Sapiens
uuacucugcacuauagccauuugcccca

SEQ ID NO: 5633 - RNA, 22 nt, Homo Sapiens
uuacaaguuucaguaauagcug

SEQ ID NO: 5634 - RNA, 23 nt, Homo Sapiens
uguggguggacgugguuggugau

SEQ ID NO: 5635 - RNA, 27 nt, Homo Sapiens
uguggguggacgugguuggugauuggc

SEQ ID NO: 5636 - RNA, 21 nt, Homo Sapiens
aaccuguucaaaauguuaaua

SEQ ID NO: 5637 - RNA, 25 nt, Homo Sapiens
auggcauucgcagugcccagugaug

SEQ ID NO: 5638 - RNA, 21 nt, Homo Sapiens
gcauuacucugcacuauagcc

SEQ ID NO: 5639 - RNA, 22 nt, Homo Sapiens
guggguggacgugguuggugau

SEQ ID NO: 5640 - RNA, 26 nt, Homo Sapiens
guggguggacgugguuggugauuggc

SEQ ID NO: 5641 - RNA, 21 nt, Homo Sapiens
cacauucuacuucagcuuugg

SEQ ID NO: 5642 - RNA, 21 nt, Homo Sapiens
agguuugcaaagacugagugu

SEQ ID NO: 5643 - RNA, 26 nt, Homo Sapiens
uccacauucuacuucagcuuuggaug

SEQ ID NO: 5644 - RNA, 82 nt, Homo Sapiens
aaaaaugaaaggaaaaggaggggaggcagaugggaagaugacccuuuuacaaauguuucuucuccuuuuucuuucuguuuuu

SEQ ID NO: 5645 - RNA, 102 nt, Homo Sapiens
aaaagccauguuacagauggcucuccuuggauggcuauuccagucgguuuccggggcugacuggcccacuccauuuaggguguguagcugugaguguauuuu

SEQ ID NO: 5646 - RNA, 106 nt, Homo Sapiens
aaaauaaaauagaaaucauuauugucuaggcuuuuggagaagcauaugcugugaaaaugaucacggcugugcuccuaaaagccagucauguuucuguaacaguuuu

SEQ ID NO: 5647 - RNA, 77 nt, Homo Sapiens
aaacggaugggccugggggccacuuugcacaggguucuccagagcccugcccauccugccuccaccacuuccuguuu

SEQ ID NO: 5648 - RNA, 68 nt, Homo Sapiens
aaacguguggugauugaugcuuucauggacucuguugccccaaguccccaagccuuguaccagcguuu

SEQ ID NO: 5649 - RNA, 79 nt, Homo Sapiens
aaaggaugaaaagguggugucauguuuuggggagaaucuuacuucucaaauggaaauugcacuuuuugcugaauccuuu

SEQ ID NO: 5650 - RNA, 63 nt, Homo Sapiens
aaaggcagacggugaaugccuugagaaauuguucagauucaaggacaagcauuuguugccuuu

SEQ ID NO: 5651 - RNA, 108 nt, Homo Sapiens
aaagggggguguaguuauaaccagggucaucuuugaucucauuuggaaaacuucauuucaagauggaguugcaggugguccuuggggacugauucugcaagccccuuu

SEQ ID NO: 5652 - RNA, 72 nt, Homo Sapiens
aaauacaaauuccugggucuccuggcagacuugcuaaaucagaaucuccaggggauccuggaauugguguuu

SEQ ID NO: 5653 - RNA, 108 nt, Homo Sapiens
aaauagccauucccucgugcugcgacaguuccauuccuaaugcagacuuacaaaaacuagguguaaggcuggcauuagggugaggccaggaugagagcagggcuuuuu

SEQ ID NO: 5654 - RNA, 93 nt, Homo Sapiens
aaaucucucaaccacugcaagcuuuuaaaagucuggcgcaucuugacuuucuuuucaccuauaacagccagcuuggauucauuugagagauuu

SEQ ID NO: 5655 - RNA, 77 nt, Homo Sapiens
aaauuuugggggaauuuuacugcccuagaggacugguucuagccacuuucccagggcaguggaucucugcaaaguuu

SEQ ID NO: 5656 - RNA, 99 nt, Homo Sapiens
aaccuccagcacaccaccaaugaauagcaguaauaccagcauaauugucugcaguucugcugagauacgugcucuauuuuauuggcuuggcuguagguu

SEQ ID NO: 5657 - RNA, 66 nt, Homo Sapiens
aacguguggugauugaugcuuucauggacucuguugccccaaguccccaagccuuguaccagcguu

SEQ ID NO: 5658 - RNA, 84 nt, Homo Sapiens
aacuggucggugauuuagguaguuuccuguuguugggauccaccuuucucucgacagcacgacacugccuucauuacuucaguu

SEQ ID NO: 5659 - RNA, 81 nt, Homo Sapiens
aagaagaaagaaagcuggcuagggaccucaggaucucaagaacaucauggaauugaguucccuggguuuucuuuuugccuu

SEQ ID NO: 5660 - RNA, 96 nt, Homo Sapiens
aagacggcaaauauucuggggugaaggagguauaauggggaaacacauuuauuuuccccuuuuaaacuucccugcugccccagucuuugccuucuu

SEQ ID NO: 5661 - RNA, 95 nt, Homo Sapiens
aagagacuuuguagaugugauuaaauuaaggcucuugagauugggagauuauccuggauuaucagaguaggcuugauguaaucacaagaguccuu

SEQ ID NO: 5662 - RNA, 78 nt, Homo Sapiens
aagaggcaggcauucuggguaucagacauaaauccccucccaggaacuuuuguguccugacccagaggacuggcucuu

SEQ ID NO: 5663 - RNA, 110 nt, Homo Sapiens
aagaggccuaaaaguuuaaugccagaccuuaggggcaggauggagcagggcuaaaagaugucucuuugggccugucugccugcuuuccuuccuuccuuuucuuuccuuuu

SEQ ID NO: 5664 - RNA, 96 nt, Homo Sapiens
aagauugguggccaccacauucagucuccuucacagcuaaguguagccacauaacuaugcuuuggccacggggauaugaaugcuacuacuaauuuu

SEQ ID NO: 5665 - RNA, 79 nt, Homo Sapiens
aagcacuuacuucuuugcagaugagacugagacauaguuacaaagucucaguuuccucugcaaacaguuguaagugcuu

SEQ ID NO: 5666 - RNA, 89 nt, Homo Sapiens
aagcccuugacuggggcugcugccuuucucucagagaugcccugcccagugaggaggaaucuagagaggcagucuggccacaguugcuu

SEQ ID NO: 5667 - RNA, 91 nt, Homo Sapiens
aagcugggggcacuggcuucugcucuugcucuuucuucuggaaacauuauucuguuccuuuggacaugggcaaggguccugucccuaacuu

SEQ ID NO: 5668 - RNA, 100 nt, Homo Sapiens
aaggagggaaguuuaaauuuuguaauauggccuugguugcagaaguccugauacuaagguaauucuagcaaccuuaauauuuuacaguagauucccccuu

SEQ ID NO: 5669 - RNA, 92 nt, Homo Sapiens
aaggauguguucacugaagccuaccauacauaugugacccuuauuaguuacacauaaggcauuuuuaugguggucuuugcccccuuaucuuu

SEQ ID NO: 5670 - RNA, 94 nt, Homo Sapiens
aagguauuuucugagcugugagccugccuuccagugacauguucuaaaaauugcaaguuauuugaggaggcuuuacagccaauaggaaguucuu

SEQ ID NO: 5671 - RNA, 109 nt, Homo Sapiens
aagugcuggauauugcuaagaauucagguagucucgggaucuccagagucuccauacuaggacaggagaucuucagaaccuggaggaauggaaauagucuagucagcuu

SEQ ID NO: 5672 - RNA, 79 nt, Homo Sapiens
aaguguucuccugaggacccuuaggucagacagagaagcuuucucuuucugaugggaagggucaaaguggaaaucucuu

SEQ ID NO: 5673 - RNA, 78 nt, Homo Sapiens
aaucaaaaagguuugagcaaaggaugaacacaaucuacagucagauuaugucacuccuuugcccagaccuucuugauu

SEQ ID NO: 5674 - RNA, 105 nt, Homo Sapiens
aaugaaguggaaucaagguggcaagaaaauuuagaaucguuucugauagggacuuucccuuauccuaaauguguuuugaaggcacacguuauuuccauugucauu

SEQ ID NO: 5675 - RNA, 102 nt, Homo Sapiens
aaugcuggacauuuaucuggagcugcaggggguaaagugucauccuugggaaauucaaagcuggccuguaccugcugagagcaccagggauauggucacauu

SEQ ID NO: 5676 - RNA, 49 nt, Homo Sapiens
aauggcuagguaagggaagaugcauucauuuauucauucaacuaauauu

SEQ ID NO: 5677 - RNA, 129 nt, Homo Sapiens
aauguaaaccccuuaaagcagauguguguggggccuuaugaagaccaggauucugcgggugucaggggauugccccucuugacagagacuaggguuuuagacugaggcuuccugcaggguguucgcauu

SEQ ID NO: 5678 - RNA, 104 nt, Homo Sapiens
aauguucuggcacauaguaauuaauuaagaaaaucgagcacccuuaauuaccuagaaugcaggguuguuaguuuuuugguugacuuuuguuuugcuggggcauu

SEQ ID NO: 5679 - RNA, 114 nt, Homo Sapiens
aauguuuacugaguauucaccaggugcuggguggagaaagaagacuuaaagauucccuagacaucuccucuccccuagacucaggaccauggcacuuauuuucuagucaauauu

SEQ ID NO: 5680 - RNA, 92 nt, Homo Sapiens
acaaaugucuuuggccucugugccuuuccucagacuuucaggcccauugugagagagcuaggaagauacaggguugucaaguugacacaugu

SEQ ID NO: 5681 - RNA, 103 nt, Homo Sapiens
acaauagucuaagagcuaacuaguugcacuugucuuuacccuagaggcuugcuaaauaaagcauacuuucuggagggcaagugcaggggucgcuucuguuugu

SEQ ID NO: 5682 - RNA, 91 nt, Homo Sapiens
acacacgugagauguguuccaggaagucgucuugagcacccauugcucagaguuuauauuggacuugcuuucuagcacauaccacaauugu

SEQ ID NO: 5683 - RNA, 104 nt, Homo Sapiens
acaccuccaaccucccugccuuugaacccuguguuaacaaugagaagcuuguuuauuugaaggcuggguucucauuggcccacagggguagguuguaauugugu

SEQ ID NO: 5684 - RNA, 85 nt, Homo Sapiens
acaccuccuguccaguacugucuugaugccugccccauaaagugacucugcgaugggcaaguguuaugaucagauuggagggugu

SEQ ID NO: 5685 - RNA, 93 nt, Homo Sapiens
acacugccucuagauuguuauuuuguccaagagagagaucauggagagagucucucucgcucacggaggcucugucuuucuaggaguaugugu

SEQ ID NO: 5686 - RNA, 90 nt, Homo Sapiens
acacuggacagauggauguugaugagcuugugugcagcaguucuacuggaaguauguacaaggggcucagccagccaauuuggacggugu

SEQ ID NO: 5687 - RNA, 74 nt, Homo Sapiens
acagagguugcagugagccgagauacauacauauauauguauauaucaugugcaacuuggcucugcuccuuugu

SEQ ID NO: 5688 - RNA, 77 nt, Homo Sapiens
acagcucaccugcaaggcuuucaacucugcugaccuucagagugucagagcagugccgaagcccaggacauggcugu

SEQ ID NO: 5689 - RNA, 94 nt, Homo Sapiens
acaggagaauugcuugaacccuggagguggagguugcagugagccgagauugcaccauugcacuccacccuaggcaacaagagcaaaacucugu

SEQ ID NO: 5690 - RNA, 92 nt, Homo Sapiens
acauauggcagaauggaagugauuucuccuaaugaaaaugaagugcucuuuugaguauuucuuguuuuauugagauuccuaucugcccuugu

SEQ ID NO: 5691 - RNA, 72 nt, Homo Sapiens
acaugucauauugagccuccuacugaacucagccacauauggaaguuugaaguggguccucgaaaugcaugu

SEQ ID NO: 5692 - RNA, 113 nt, Homo Sapiens
acauuauuaggaauuucaagagcugggcauguuggaguaugccugugaucucaguuacuuaggaggcugaggcagaaggauuacuugaggccaggaguuugagucuguagugu

SEQ ID NO: 5693 - RNA, 81 nt, Homo Sapiens
accagaggcucagagaauggcacagcuguccuguucuccacauuugaauaggccggacucaguuuucucugaguuuuuggu

SEQ ID NO: 5694 - RNA, 111 nt, Homo Sapiens
accagugguuagcagaugaggugaaagagaugggacagugacuguaucuguucugaugaaggagauugugcaguuacaugcguaacgucauuaaacuucauucuuccaggu

SEQ ID NO: 5695 - RNA, 73 nt, Homo Sapiens
acccacauucuuagcuuggcuucaguuucuuuccgggucuuacugagaggugaagccaggcuucugggugggu

SEQ ID NO: 5696 - RNA, 89 nt, Homo Sapiens
accuauucccuguggcuuaggugagcaugugaccaggccuggccuccugagucccacagcuuccuagccacagugauaaaagaaugggu

SEQ ID NO: 5697 - RNA, 82 nt, Homo Sapiens
accucaucucuacaaaaaauacgaaaauuagcugggugugguggcauguaccuguagucccagcuauuugagagacugaggu

SEQ ID NO: 5698 - RNA, 71 nt, Homo Sapiens
accucucauuucuccucaaugccacugcacugaugucaacugacuuagggcaggcaugagagaacugaggu

SEQ ID NO: 5699 - RNA, 104 nt, Homo Sapiens
accugccuauauuacauucauuuugaugguuuguaucucaaaggaguacagugaacgaaacuuguuuaaagauacaccggaaagaaaaagagaagaggcagagu

SEQ ID NO: 5700 - RNA, 85 nt, Homo Sapiens
accuucuuugcugccugggagaugcugcuaugggcguuuauuugaucugcuuguggcucaguuugcucagcagugaaaugaaggu

SEQ ID NO: 5701 - RNA, 109 nt, Homo Sapiens
accuugcugacagugguaauuguagugugaaaggcauaguguccucuugcuuaaucaugggauacagacugcucacuucuuaaaugguuaccuuugcaguuuaagaggu

SEQ ID NO: 5702 - RNA, 112 nt, Homo Sapiens
acuacuggguguauaaauguguuuguguguguauguauuuauagauguucuuuaagguacccuugaaaacucuacauuauguaugccacauaaugacauuucagucaguggu

SEQ ID NO: 5703 - RNA, 92 nt, Homo Sapiens
acuccagccuggccucugaccccaguucaauccgaccaugcccaagcccaagcgggccuuuccuccagaacugcuccggggccuggcugugu

SEQ ID NO: 5704 - RNA, 78 nt, Homo Sapiens
acucuauuuuauucaaauggcacuaugauaugaguucaaaaaauuuuugaaacaguguccuuuguuuugagauggagu

SEQ ID NO: 5705 - RNA, 91 nt, Homo Sapiens
acucuuaaaccuuuagaaaugcuacagcaucuagcuucucuagaucaauaaucacagaggcuuaagugcugaccucauaaagauaaagagu

SEQ ID NO: 5706 - RNA, 84 nt, Homo Sapiens
acucuugagcucccuccacuucugaggacguuuccugacacauucaacagcaucagcguccaaucaggagggagcucaaagagu

SEQ ID NO: 5707 - RNA, 112 nt, Homo Sapiens
acucuuugagaugacugguauugaauggagcagucuuugaaaggcaccaacccuuccuaacugaugguggucucuugaaagaggcucuuccaaauuugucuucugaaagugu

SEQ ID NO: 5708 - RNA, 87 nt, Homo Sapiens
acugaagccuccugccaauagucacaugagugagucuggaagugaaucuuucagcaccaucagaugacuguaucacuggcuuacagu

SEQ ID NO: 5709 - RNA, 92 nt, Homo Sapiens
acuggaaaucacugccauuuccaggagaucaccuauccuaguuuugaggaauagucauugagguggguuuccuuaauggcaucucuucuagu

SEQ ID NO: 5710 - RNA, 84 nt, Homo Sapiens
acuggagacacaucuaauggcugugcugaugucaagggacuuucuaaucauguucaucaguugauagcagaugcuguuuccagu

SEQ ID NO: 5711 - RNA, 99 nt, Homo Sapiens
acuuuuggcucauuuuuugaugcaugugaccugggauuauaaaugugaaauuagguuuacgaaaggauccagugucauugugcaucaugggcaaggagu

SEQ ID NO: 5712 - RNA, 130 nt, Homo Sapiens
agaaaaauuaguuaauauuuaaaaaacuguauugugcauuuuggcuucacauguuuaacuuuuuuuaagaaaaaaguugcaugaauggaaaaaaaaucuguauacaguaucuguaaaaacugucuuaucu

SEQ ID NO: 5713 - RNA, 94 nt, Homo Sapiens
agaacaagggcuaaauucaaaucaaauuuucccuguacccuaagaaaaauaauuaggccgggagauguuugacuaagugaguaggcauuguucu

SEQ ID NO: 5714 - RNA, 84 nt, Homo Sapiens
agaaucacuugaaccugggagguggagguugcagugagccgaaauugugccacugcacuccagucuaggugacagagcgagacu

SEQ ID NO: 5715 - RNA, 84 nt, Homo Sapiens
agaaucacuugaacgugggaggcagaggcugcagugagccgagaucgugccacugcacuccagccugggcaacagagugagacu

SEQ ID NO: 5716 - RNA, 84 nt, Homo Sapiens
agaaucgcuugaacccaggaggcacagguugcaguaggccgagauugugccacugcacuccagccuggguggcagagugagacu

SEQ ID NO: 5717 - RNA, 84 nt, Homo Sapiens
agaaucgcuugaacccaggaggcggagguugcagugagccaggaucacgccacuguacuccacccugggcgacagagcgagacu

SEQ ID NO: 5718 - RNA, 84 nt, Homo Sapiens
agaauugcucgaacccgggagacagagguugcagugagccgagauugugccacugcacuccagccugggcaacagagcgagacu

SEQ ID NO: 5719 - RNA, 79 nt, Homo Sapiens
agacacugaauuggacauugauuuccuuuucucugcgucgaaaugucaaggaaaguugcaagucugugauuuuguguuu

SEQ ID NO: 5720 - RNA, 113 nt, Homo Sapiens
agacagugcugggucaaacagccuuuauuuuagcaguugugagacccuagagaacuccuuugguguuuuggggucuccccagcaugcacaauggggguuaugcuagcaucucu

SEQ ID NO: 5721 - RNA, 86 nt, Homo Sapiens
agacaugucaaggcaggagccaucugaucgaccuuagacuuggcaagcugguggcuaaguccagugcucacugccgacaucugucu

SEQ ID NO: 5722 - RNA, 86 nt, Homo Sapiens
agaccaccuuauucuuuucuuauggguauguggcaugaaugccaucauuuauuuacccagcugccaguugaagaacauuuuggucu

SEQ ID NO: 5723 - RNA, 130 nt, Homo Sapiens
agacguggggucucgcuauguuggccagguuggucuugaacucuuggccucaagcauuccuccugccucagcuucccaaagugcuaggauuacagccaugagccaauaguaguaaaaugacuuuuuguuu

SEQ ID NO: 5724 - RNA, 93 nt, Homo Sapiens
agagagagucucacucugucgcccaggcuggagugcaguggugugaucucggcucacugcaaccucugccuuccggauucaagugauucuccu

SEQ ID NO: 5725 - RNA, 106 nt, Homo Sapiens
agagaggaaaugagaggagucggcuggggcgaguguggaccgcagcccagaguuagucuuggcugcagugcaacucuuucuaaaauguuauucucacgcccuuucu

SEQ ID NO: 5726 - RNA, 80 nt, Homo Sapiens
agagaugcuaaguuuagauuccagggggcaggacuggauuuuuaauuucaucuggcuccugaguccuagcuccuaauccu

SEQ ID NO: 5727 - RNA, 83 nt, Homo Sapiens
agagcugguguguagcggguaccuucugucugcuggcacuagguauuuuacacauuaaaucagcucguucucacaucagcucu

SEQ ID NO: 5728 - RNA, 78 nt, Homo Sapiens
agagcuuagguagacagacuugaccuuggagaggccagagaagccuucucugaggacagaaaguuugugcugaagucu

SEQ ID NO: 5729 - RNA, 84 nt, Homo Sapiens
agaggauugcuugagcccagggaggucaaggcugcagugauccaugauugcgccccuguacucugggcaacagagcaagacccu

SEQ ID NO: 5730 - RNA, 96 nt, Homo Sapiens
agagggagaauugcuugagcccaggauuucgaggcugcagugagcuaugaucacaccacugcacuccagccugggcaacagagcaagacucugucu

SEQ ID NO: 5731 - RNA, 115 nt, Homo Sapiens
agaggguugacauuagguuuggugagaugaguugcuuggcacagaucagcagaacaggacccuggugauaaggcaucuggcuuugcuaaccacuuaucaucuuccauuauucucu

SEQ ID NO: 5732 - RNA, 107 nt, Homo Sapiens
agagguguuccuuaggccacacccugcccucccuggacugccugaccucgcuccaaggcucaggggaagguucugagggcaggugugaaaaugcuuggaaugucccu

SEQ ID NO: 5733 - RNA, 124 nt, Homo Sapiens
agaguauaccugugcccgguugcuguagcucaugccuguaaucccaccacuuugggaggccaaggcggguggaucauuugagguuaguaguuugagaccagcuuggccaacauggggaaacucu

SEQ ID NO: 5734 - RNA, 109 nt, Homo Sapiens
agagucaccuaugaagcauuaaaauaauuaaagugucugaggccuuccccuucaauaaaucugggauugggcccaggcaacuguguuuuuuaagcacccagguuauucu

SEQ ID NO: 5735 - RNA, 86 nt, Homo Sapiens
agagucucauucuguugcccaggcaggagugcaauggugugaccucaggucacugcaaccucugcugccuggguucaagcgauucu

SEQ ID NO: 5736 - RNA, 86 nt, Homo Sapiens
agagucuugaucugucacccaggcugcaguguaguggcaugaucucggcucacugcaacccccgccuccuggguucaagccauucu

SEQ ID NO: 5737 - RNA, 97 nt, Homo Sapiens
agauccgugguccuuggagguuuuagggaaugaacaaauagaggccaguauuaggaggcuuagcuccagagauucuagaccuuggggucagggaucu

SEQ ID NO: 5738 - RNA, 113 nt, Homo Sapiens
agauguauuaugucuguccuugcggggguucuggucccugugucagucuuaacucucaugaauauagagguaguguuaagaggccagaacccuagggacgcuuuaaauucacu

SEQ ID NO: 5739 - RNA, 102 nt, Homo Sapiens
agaugugcuuccuguccucaguaaagaacuuggaguauguuguuccucaaauaucuuuugaugaaugggugcuccaggaguuucuacugacaggcuacauuu

SEQ ID NO: 5740 - RNA, 113 nt, Homo Sapiens
agauuuuuucugauacuacauauugucaguuuuuuaaauacucaguuugugcuaaaagaaaacauucggcaacugauaucugcuguucuguauguaucugucaguccagauuu

SEQ ID NO: 5741 - RNA, 107 nt, Homo Sapiens
agcaaggacaaguugugaccuucccaguccucucuccauuugcagaucagcaagcuucugucagcaaggagggguggacaaugaaacuggguucagcuugauuuguu

SEQ ID NO: 5742 - RNA, 83 nt, Homo Sapiens
agcagacugaacuaagacacccucugccugugguugucuuggcaaagccagguaaugcaggagagggguggacucagccugcu

SEQ ID NO: 5743 - RNA, 101 nt, Homo Sapiens
agcagacugcccuguugaccagaauuuguuagauugcuauuacaaugcugauuauauuuuauagcaauuacugacauaagguuauacuuugggcaauggcu

SEQ ID NO: 5744 - RNA, 71 nt, Homo Sapiens
agcagaggcuggggaauggggguucugcucucacugaaugguggggaaccuucaacugcuuagccugugcu

SEQ ID NO: 5745 - RNA, 57 nt, Homo Sapiens
agcagcacagaaauauuggcacagggaagcgagucugccaauauuggcugugcugcu

SEQ ID NO: 5746 - RNA, 92 nt, Homo Sapiens
agcaggauuaggaagagaagcauugugagaaacagguuuuggguuuugcugaaauuugcuugucagcauugcaucacuuuuccuuaacuguu

SEQ ID NO: 5747 - RNA, 88 nt, Homo Sapiens
agcauaugacagcaagacacuggcccuggaauccuccgugucacaugugggcugcugacaggaagaaugugcuuuuguuguuguuguu

SEQ ID NO: 5748 - RNA, 100 nt, Homo Sapiens
agccauucccucgugcugcgacaguuccauuccuaaugcagacuuacaaaaacuagguguaaggcuggcauuagggugaggccaggaugagagcagggcu

SEQ ID NO: 5749 - RNA, 94 nt, Homo Sapiens
agcccuaauaucuauaauuugaacuguacuggacccauaguuuuaacugaaaagggccaaacaaguggugucuguccaguuccuggacugggcu

SEQ ID NO: 5750 - RNA, 95 nt, Homo Sapiens
agccugggucacuguaugguaccagugucagcuuccuguguuacacgagauggcacaguugggugaagcuggugaugaagguaugugaccccucu

SEQ ID NO: 5751 - RNA, 83 nt, Homo Sapiens
agcggugaagaccaaggccagagcuuaaacucauaggggucauucaacucuguuuuuauuaguuguccuugguuuauacuguu

SEQ ID NO: 5752 - RNA, 114 nt, Homo Sapiens
agcuauugugacaaucuugguuaccauccauuaagugcugcugauuuuggaaagaucaugaaaaacgucuuuccaaacaugaaggcacgucguuugggcacaagaggcaaaucu

SEQ ID NO: 5753 - RNA, 90 nt, Homo Sapiens
agcugcagcucuuucuucccuaugagcuuggacacaucaauccuaaacuaggagugugaaggaggaagggaggagcagggagcagcaguu

SEQ ID NO: 5754 - RNA, 109 nt, Homo Sapiens
aggaagaggcuggcuguguggaugagagcaacuugcuuuuuacaauaauuauuuguuauuguaaauuaacaauuugcucuucugguauuauauggaaguauuugauccu

SEQ ID NO: 5755 - RNA, 88 nt, Homo Sapiens
aggaagauugugugaguccaggaauuggaggcugcagugagcuauaauugugccaacuguacuccagccugggcaacaguuagacccu

SEQ ID NO: 5756 - RNA, 125 nt, Homo Sapiens
aggaauguggaaaaaccuuuauuuguggcucagaccuuacucgacaucacagaauucacacuggugagaaacccuaugaauguaaggaaugugggaaagccuuuaguagugguucaaacuucacu

SEQ ID NO: 5757 - RNA, 85 nt, Homo Sapiens
aggaauuugucagaaacucuuuccuguuuugguuuggagaguaguucucucuaacuagagacaggaguggccuugaaauuuuccu

SEQ ID NO: 5758 - RNA, 86 nt, Homo Sapiens
aggagggaaaggcccaggagggggagaaaggcagacucagccagggaugggugaggguuucccugucccaaagcaagacccaagcu

SEQ ID NO: 5759 - RNA, 87 nt, Homo Sapiens
aggaucacuuaaggcccaggaguucgaggcuguagugagcuaugacugugucacugcacuucagccugggcaauggagcaagauccu

SEQ ID NO: 5760 - RNA, 86 nt, Homo Sapiens
aggaucacuugagcccaggaguuggaggcugcagugagcuaugauugcacuacugcacuccagccugggcaacagagcaagauccu

SEQ ID NO: 5761 - RNA, 86 nt, Homo Sapiens
aggaucacuugagccugguaugucgaggcugcagugagcuaugaucgugccacugcacuccaaccaggcugaccgagccagacccu

SEQ ID NO: 5762 - RNA, 86 nt, Homo Sapiens
aggauugcuugagccuggaagcuggagccugcagugaacuaucauugugccacuguacuccagccuaggcaacaaaaugaaauccu

SEQ ID NO: 5763 - RNA, 93 nt, Homo Sapiens
aggcaaggucucacucggucauccagguuggaaugcaguggugugaucacaguucacuguaaacucaaacuccugggcucaaggaaucuuccu

SEQ ID NO: 5764 - RNA, 104 nt, Homo Sapiens
aggcacacacgcaugguuuucucuuuuauaugcuagauuucaucccugacagcagaaaaugauuggcaaugguuaugacggagaacaugcaauagcgugguccu

SEQ ID NO: 5765 - RNA, 94 nt, Homo Sapiens
aggcaccuagagacuucacaagcuaauggcagucccuggagcaggaagcaacuuguuauucugcucaagagaauccaccagcagcucuuggccu

SEQ ID NO: 5766 - RNA, 98 nt, Homo Sapiens
aggcaccuggggguguagaccgggguggagccgcaugggcaccuggggguguagaccgggguggaacuauguaaacaucccacacacucaggugacuu

SEQ ID NO: 5767 - RNA, 97 nt, Homo Sapiens
aggcagaagaauugcuggaaucuaggaggcggagguugcagugagccaagaucgcgccacugcacuccagccugggcaacacagcgagacucugucu

SEQ ID NO: 5768 - RNA, 98 nt, Homo Sapiens
aggcaggagaauugcuugaacccaggagguggagguugcagggagucgagaucgugccacugcacuccagccugggcaaugagagcaaaacuccaucu

SEQ ID NO: 5769 - RNA, 97 nt, Homo Sapiens
aggcaggagaauugcuugaaccuggaaggcggagguugcagugagccaagauugugccacugcacuccagccugggcaacacagcgagacucugucu

SEQ ID NO: 5770 - RNA, 97 nt, Homo Sapiens
aggcaggagaauugcuugaaccugugaggcagagguugcagugagcugagaucaugccacagcacuucagccugagcgacagagcgagacuccaccu

SEQ ID NO: 5771 - RNA, 97 nt, Homo Sapiens
aggcaggagagucgcuggaaccugagaggcggagcuugcagugagccgagaucgcgccacugcacuccagccugggcaacacagcgagacuccgucu

SEQ ID NO: 5772 - RNA, 99 nt, Homo Sapiens
aggcaggaggaucacgugagcccaggaggugaaggcuacagugaagugagaucaugcaacuguacuucagccugggcaacagagcaagauucucuuucu

SEQ ID NO: 5773 - RNA, 72 nt, Homo Sapiens
aggcauugucuccaacauguaccacuggucuggcuuuuguuaggcccauuaauaguguacaugugacagccu

SEQ ID NO: 5774 - RNA, 76 nt, Homo Sapiens
aggccaucuuaaucggggccagagaugacacucucccccuguaacucagccuggcucugucuauugggaugugccu

SEQ ID NO: 5775 - RNA, 112 nt, Homo Sapiens
aggcccuggguggcgugagggggaaggugugugugugggguggcagggaggagaaggaaucugcucugugcuuauucuuguccccguuucuuuugcagccugcccacggcuu

SEQ ID NO: 5776 - RNA, 81 nt, Homo Sapiens
aggcgcuaaaccuaaggcuuuucugggaagagcuguuaagauuagacuguucucccaaaaagccaauaauucugagugucu

SEQ ID NO: 5777 - RNA, 97 nt, Homo Sapiens
aggcgugagaaucgcuugaaccuggaagguggugguugcagugagccgagauccugccacugcacuccagccugggcaaccaagcgagacucugccu

SEQ ID NO: 5778 - RNA, 130 nt, Homo Sapiens
aggcucacacagcaagucuuugucaaagcuuaggaauggaaguagguuguccccuccuagucaugggaucucuccaacucacuagacaaucuugcuuuacgugcugaugaacaugcucugugagcagccu

SEQ ID NO: 5779 - RNA, 83 nt, Homo Sapiens
aggcugagguaggaugauugcuagcuagaguccaggaguucaggauuaaaaugagcuaugaucauaccacugcacuccagccu

SEQ ID NO: 5780 - RNA, 78 nt, Homo Sapiens
aggcugagugcaguggugugaucucggcucacugcaagcucugccucccagguucacgccauuguccugccucagccu

SEQ ID NO: 5781 - RNA, 87 nt, Homo Sapiens
aggcugggaacauucagggcugcucaagcccaggguuggcaacccccacucccuccaacacaagcagcucaagucuucuccagaccu

SEQ ID NO: 5782 - RNA, 92 nt, Homo Sapiens
aggcugggaacugugacucguacuuguaauccuagugcuuugagaggcugaggcaggaggauugcuugagaccaggaguuugagaccagccu

SEQ ID NO: 5783 - RNA, 92 nt, Homo Sapiens
aggcugguucgucguuucugccucuccauucuugucuuuuuaauucuuuguguuauuugagauggaguuugagagggaauaugaacaagccu

SEQ ID NO: 5784 - RNA, 87 nt, Homo Sapiens
aggcuguaugcuguuaaugcuaaucgugauagggguuuuugccuccaacugacuccuacauauuagcauuaacaguguaugaugccu

SEQ ID NO: 5785 - RNA, 103 nt, Homo Sapiens
aggcuuuagaguagcaaaggccccagggaaugggcucuguugggacagcuugucuuugguuuccaguaguuacuccucccugaaggggucaagguugcuuccu

SEQ ID NO: 5786 - RNA, 112 nt, Homo Sapiens
agggaaaaaauucauaauucagacaggcucucggggcuucaccauacaacgccuuucuuguauuugguuaguuuuaugggccuggaguguugaccauguauuaauuuucucu

SEQ ID NO: 5787 - RNA, 98 nt, Homo Sapiens
agggagagucuuggggugaagagguuugagccuucuccugcucuguccguggagcaagucaaauaaaugcugagaccgucagcuccucauuucuccuu

SEQ ID NO: 5788 - RNA, 129 nt, Homo Sapiens
agggcaagauccucgcuccaaccguggcccguguucucuccuuuuguccccauagugugacuccgccaggaacuuggaauggcugaagacugugaaugagagucaugggucuguggaacgcucaucccu

SEQ ID NO: 5789 - RNA, 84 nt, Homo Sapiens
agggguuguccuuaaguucccucugccugcaguccugcuuuguuuuggacaaguaggagugacaagcaggucagcacagcccuu

SEQ ID NO: 5790 - RNA, 106 nt, Homo Sapiens
agggugcuguugcuucuaggucuuuugagagcauagagccaggaagcauacacacauuuuuggcuccugacuuuuugcucuuucccagguuauugaguuugccccu

SEQ ID NO: 5791 - RNA, 80 nt, Homo Sapiens
agggugugcacugggcaagggcagggcggcaggugucaggccggcuuggacaaugaaacccugaccuugcugcauuccuu

SEQ ID NO: 5792 - RNA, 88 nt, Homo Sapiens
aggucucauuuuguugcccaggcugggguacaguggugcaaguauggcucacugcagccuugaacucuuucugggcucaagugauccu

SEQ ID NO: 5793 - RNA, 91 nt, Homo Sapiens
aggucucauuuuguugcccaggcugggguacaguggugcaaguauggcucacugcagccuugaacucuuucugggcucaagugauccuccu

SEQ ID NO: 5794 - RNA, 100 nt, Homo Sapiens
aggugauggaugggcaugcagugaggucacuguuggaugucagacuggagcccgaccucagugacucucaccagggccucagacugugagccuggcaccu

SEQ ID NO: 5795 - RNA, 69 nt, Homo Sapiens
agguggcagagaggcaauaucaauccuucugcaucacacagugggaaaaguuugucucauugcaguucu

SEQ ID NO: 5796 - RNA, 80 nt, Homo Sapiens
agguggcagagaggcaauaucaauccuucugcaucacacagugggaaaaguuugucucauugcaguucucuuccaagccu

SEQ ID NO: 5797 - RNA, 94 nt, Homo Sapiens
agguucacacauuggugccuuugcugggacaaaaaagagacuuuccugaggguugucuuguuccaguuucucagccacucaccaugugauaccu

SEQ ID NO: 5798 - RNA, 119 nt, Homo Sapiens
agguucuggugaauucaggaugguauuuuugucuuugaauaguuucugguugcauuucuauagugggggugaagcuaggggaacuucugugaucuuccugaggucacuucaaagugccu

SEQ ID NO: 5799 - RNA, 106 nt, Homo Sapiens
agguugguaaaagugguuucuaacacaguaucucuucuuuuagguguucaguggaaucacacuuacaaaauuuggagggauugugguguuggcuuuugccaaaucu

SEQ ID NO: 5800 - RNA, 88 nt, Homo Sapiens
aguaucacuugaaccagggaggcagaggcugcaugcagugagccaagauugcaccacugcacucuaaccugggcaacagaaugauacu

SEQ ID NO: 5801 - RNA, 106 nt, Homo Sapiens
aguaucuggaauucuauugugugugagucugugcaggaacacaaugagucucaaagugaaaaaaacuuuggauuccugguuccuacagcacuuuuguucagauacu

SEQ ID NO: 5802 - RNA, 89 nt, Homo Sapiens
aguauuauuaagacuuuuccugggucugggcugugccuguugcugccucugagacaagucagccuaauacaggaaaagcuuaauucucu

SEQ ID NO: 5803 - RNA, 91 nt, Homo Sapiens
agucaccagaguccauuguauuagucuuauuuucaucaccgugggcguacccugugggaugauguuaaacguacucuagacucuguuggcu

SEQ ID NO: 5804 - RNA, 70 nt, Homo Sapiens
agucacuggaaaaugcuuacaggcaguagccaccaucauguggcacaaagugggcaucauccuagugucu

SEQ ID NO: 5805 - RNA, 88 nt, Homo Sapiens
aguccucuuaugcuguugacauuuccccaugugaugcuauugcuucucuuuggaggcuaagcaguaaaugggguuaacagcaagggcu

SEQ ID NO: 5806 - RNA, 82 nt, Homo Sapiens
agucucacucugucacccaggcuggagugcaguggcaugaucuugguucacugcaaccucugcuucugggauucaagagauu

SEQ ID NO: 5807 - RNA, 84 nt, Homo Sapiens
agucucacucugucuccuaggcuggagugcaguggcgugaucucaucucauugcaaccuccaccuccuggauucaagugauucu

SEQ ID NO: 5808 - RNA, 113 nt, Homo Sapiens
agucucacucuguugcccaggcugaagucaacggcaugaucucagcucacugcaaccuccaccuccuggguucaagcaauucucgugccucagccucccaaguagcuuggauu

SEQ ID NO: 5809 - RNA, 84 nt, Homo Sapiens
agucucacucuguugcccaggcuggagugcaguggugcgaucucagcucacugcaaccuccaccuccuggguucaagugauucu

SEQ ID NO: 5810 - RNA, 92 nt, Homo Sapiens
agucucucucuggcuggaccuggacugcagucacacucuaagagcuccucuuucuacaccucugccagugggcguucggucagagacaagcu

SEQ ID NO: 5811 - RNA, 80 nt, Homo Sapiens
agucuguuguuguaaacauccccgacuggaagcuguaagacacagcuaagcuuucagucagauguuugcugcuaccggcu

SEQ ID NO: 5812 - RNA, 82 nt, Homo Sapiens
agucuugcucugucacccaggcuggagugcaguggugccaucuuggcucacugcaaccuccgccuccccaguucaagugauu

SEQ ID NO: 5813 - RNA, 84 nt, Homo Sapiens
agucuugcucuguugccuaggcuggagugcagugaugcaauuuuggcucacugcaaccuccaccuccuggguucaagcauuucu

SEQ ID NO: 5814 - RNA, 101 nt, Homo Sapiens
agugagucacauuggcuacuggugaggaaggagcagaguugugggcugagacugaugcuguucagcaucugucuuccuugucaccaacauagaugaccacu

SEQ ID NO: 5815 - RNA, 73 nt, Homo Sapiens
aguggcaggugugcaaaucacaacuuggccucccaaacuaagguacaaaguugugagucacacgucugccacu

SEQ ID NO: 5816 - RNA, 124 nt, Homo Sapiens
agugguaaugccguguguugauagaaauauguaaucgaucuuuucuuuggugggcaauuagcaauauugaggaaaguuaaagauguauguaucccuaccacuugaaacaccuggaaaugccauu

SEQ ID NO: 5817 - RNA, 125 nt, Homo Sapiens
agugucuccagauugcacgaacauuucauuuuucacacagggucaccagaauaccaucaauuuuuugguaucacugucaaaagugauccuagcaccuucugaaauaacgugagcugccagauucu

SEQ ID NO: 5818 - RNA, 123 nt, Homo Sapiens
agugugaagacaaaagccacuuucuaaggaugguggagcagaaaggcaggaguccugcucccuggcaccaucauggagcaugcccagcccagaucugccccccucugaauuuccuguugcauu

SEQ ID NO: 5819 - RNA, 114 nt, Homo Sapiens
aguguuggguugacuugaauggaggugauuguuuuagaagaaggucagaagacuagauuugcuuuucucuccaauuugaaauaccucuucuauucgaggacacccaggaacauu

SEQ ID NO: 5820 - RNA, 94 nt, Homo Sapiens
aguucaaggcugccuccucucugucuucauuaugugaauugaauguggucacacaucuguguuggagcagaggcaggggcugcagcuuucagcu

SEQ ID NO: 5821 - RNA, 59 nt, Homo Sapiens
aguucacaguggcugaagcuguucccauaagacccugaaucuagcagccacuguguacu

SEQ ID NO: 5822 - RNA, 76 nt, Homo Sapiens
aguucagacauucuagacuguuccgucagacucaguuucaaaagagaaugugugggagaacagucuuuguccgacu

SEQ ID NO: 5823 - RNA, 96 nt, Homo Sapiens
aguucccacgugcauggagcuguaguuuuucccacauuccucuuaggagcugugccuaagaugcugcgcuagcaaccucuguauugugaaggaacu

SEQ ID NO: 5824 - RNA, 85 nt, Homo Sapiens
aguuccuaugugccccacaggaaagcgcccuuaaccacugaugaguguugauguuuuucugcacuagaaggcacuauguugaacu

SEQ ID NO: 5825 - RNA, 82 nt, Homo Sapiens
aguucuaggguacaugugcacaacaugcagguuuguuacauagguauacaugugcuauguuggugugcugcacccauuaacu

SEQ ID NO: 5826 - RNA, 86 nt, Homo Sapiens
aguucugcagggcugcugccucaacauuuuagguucugauagcuguauucucaguccuggagugacagguguagccugcaguuacu

SEQ ID NO: 5827 - RNA, 83 nt, Homo Sapiens
aguuuaagaauggcucauguaguacccagcuacucugggcgacugagcccaggguacucugggaucacuugagcccaggagcu

SEQ ID NO: 5828 - RNA, 101 nt, Homo Sapiens
aguuuaaggaugucgcaaagucuggguggccuucaguccaugaaagagaacacaucuguucuaucucaggcugaggucaucugcauccucaucaauaagcu

SEQ ID NO: 5829 - RNA, 85 nt, Homo Sapiens
aguuucacucuugucacccaggcuggagugcaguggugccaucuuggcucacugcaaccuccgccugccgaguucaagcgauucu

SEQ ID NO: 5830 - RNA, 107 nt, Homo Sapiens
aguuuggguaaugaagccacagagauuugcugauacauuugcuaggcacgacuucuggucauuuagaaagcuauuuuguggcuucaucaauaagguauuccccagcu

SEQ ID NO: 5831 - RNA, 82 nt, Homo Sapiens
aguuuuaggguacaugugcacaacaugcagguuuguuacauauguauacaugugccauguuggugugcugcacccauuaacu

SEQ ID NO: 5832 - RNA, 82 nt, Homo Sapiens; identical to SEQ ID NO: 5831

SEQ ID NO: 5833 - RNA, 82 nt, Homo Sapiens; identical to SEQ ID NO: 5831

SEQ ID NO: 5834 - RNA, 82 nt, Homo Sapiens; identical to SEQ ID NO: 5831

SEQ ID NO: 5835 - RNA, 82 nt, Homo Sapiens; identical to SEQ ID NO: 5831

SEQ ID NO: 5836 - RNA, 82 nt, Homo Sapiens; identical to SEQ ID NO: 5831

SEQ ID NO: 5837 - RNA, 82 nt, Homo Sapiens; identical to SEQ ID NO: 5831

SEQ ID NO: 5838 - RNA, 82 nt, Homo Sapiens; identical to SEQ ID NO: 5831

SEQ ID NO: 5839 - RNA, 82 nt, Homo Sapiens; identical to SEQ ID NO: 5831

SEQ ID NO: 5840 - RNA, 82 nt, Homo Sapiens; identical to SEQ ID NO: 5831

SEQ ID NO: 5841 - RNA, 82 nt, Homo Sapiens; identical to SEQ ID NO: 5831

SEQ ID NO: 5842 - RNA, 82 nt, Homo Sapiens; identical to SEQ ID NO: 5831

SEQ ID NO: 5843 - RNA, 82 nt, Homo Sapiens; identical to SEQ ID NO: 5831

SEQ ID NO: 5844 - RNA, 82 nt, Homo Sapiens; identical to SEQ ID NO: 5831

SEQ ID NO: 5845 - RNA, 82 nt, Homo Sapiens; identical to SEQ ID NO: 5831

SEQ ID NO: 5846 - RNA, 82 nt, Homo Sapiens; identical to SEQ ID NO: 5831

SEQ ID NO: 5847 - RNA, 82 nt, Homo Sapiens; identical to SEQ ID NO: 5831

SEQ ID NO: 5848 - RNA, 82 nt, Homo Sapiens; identical to SEQ ID NO: 5831

SEQ ID NO: 5849 - RNA, 82 nt, Homo Sapiens; identical to SEQ ID NO: 5831

SEQ ID NO: 5850 - RNA, 82 nt, Homo Sapiens; identical to SEQ ID NO: 5831

SEQ ID NO: 5851 - RNA, 82 nt, Homo Sapiens; identical to SEQ ID NO: 5831

SEQ ID NO: 5852 - RNA, 82 nt, Homo Sapiens; identical to SEQ ID NO: 5831

SEQ ID NO: 5853 - RNA, 82 nt, Homo Sapiens; identical to SEQ ID NO: 5831

SEQ ID NO: 5854 - RNA, 82 nt, Homo Sapiens; identical to SEQ ID NO: 5831

SEQ ID NO: 5855 - RNA, 82 nt, Homo Sapiens; identical to SEQ ID NO: 5831

SEQ ID NO: 5856 - RNA, 82 nt, Homo Sapiens; identical to SEQ ID NO: 5831

SEQ ID NO: 5857 - RNA, 82 nt, Homo Sapiens; identical to SEQ ID NO: 5831

SEQ ID NO: 5858 - RNA, 82 nt, Homo Sapiens; identical to SEQ ID NO: 5831

SEQ ID NO: 5859 - RNA, 82 nt, Homo Sapiens; identical to SEQ ID NO: 5831

SEQ ID NO: 5860 - RNA, 82 nt, Homo Sapiens; identical to SEQ ID NO: 5831

SEQ ID NO: 5861 - RNA, 82 nt, Homo Sapiens; identical to SEQ ID NO: 5831

SEQ ID NO: 5862 - RNA, 82 nt, Homo Sapiens; identical to SEQ ID NO: 5831

SEQ ID NO: 5863 - RNA, 82 nt, Homo Sapiens; identical to SEQ ID NO: 5831

SEQ ID NO: 5864 - RNA, 82 nt, Homo Sapiens; identical to SEQ ID NO: 5831

SEQ ID NO: 5865 - RNA, 82 nt, Homo Sapiens; identical to SEQ ID NO: 5831

SEQ ID NO: 5866 - RNA, 82 nt, Homo Sapiens; identical to SEQ ID NO: 5831

SEQ ID NO: 5867 - RNA, 82 nt, Homo Sapiens; identical to SEQ ID NO: 5831

SEQ ID NO: 5868 - RNA, 82 nt, Homo Sapiens; identical to SEQ ID NO: 5831

SEQ ID NO: 5869 - RNA, 82 nt, Homo Sapiens; identical to SEQ ID NO: 5831

SEQ ID NO: 5870 - RNA, 82 nt, Homo Sapiens; identical to SEQ ID NO: 5831

SEQ ID NO: 5871 - RNA, 82 nt, Homo Sapiens; identical to SEQ ID NO: 5831

SEQ ID NO: 5872 - RNA, 82 nt, Homo Sapiens; identical to SEQ ID NO: 5831

SEQ ID NO: 5873 - RNA, 82 nt, Homo Sapiens; identical to SEQ ID NO: 5831

SEQ ID NO: 5874 - RNA, 82 nt, Homo Sapiens; identical to SEQ ID NO: 5831

SEQ ID NO: 5875 - RNA, 82 nt, Homo Sapiens; identical to SEQ ID NO: 5831

SEQ ID NO: 5876 - RNA, 82 nt, Homo Sapiens; identical to SEQ ID NO: 5831

SEQ ID NO: 5877 - RNA, 82 nt, Homo Sapiens; identical to SEQ ID NO: 5831

SEQ ID NO: 5878 - RNA, 82 nt, Homo Sapiens; identical to SEQ ID NO: 5831

SEQ ID NO: 5879 - RNA, 82 nt, Homo Sapiens; identical to SEQ ID NO: 5831

SEQ ID NO: 5880 - RNA, 82 nt, Homo Sapiens; identical to SEQ ID NO: 5831

SEQ ID NO: 5881 - RNA, 82 nt, Homo Sapiens; identical to SEQ ID NO: 5831

SEQ ID NO: 5882 - RNA, 82 nt, Homo Sapiens; identical to SEQ ID NO: 5831

SEQ ID NO: 5883 - RNA, 82 nt, Homo Sapiens; identical to SEQ ID NO: 5831

SEQ ID NO: 5884 - RNA, 82 nt, Homo Sapiens; identical to SEQ ID NO: 5831

SEQ ID NO: 5885 - RNA, 82 nt, Homo Sapiens; identical to SEQ ID NO: 5831

SEQ ID NO: 5886 - RNA, 82 nt, Homo Sapiens; identical to SEQ ID NO: 5831

SEQ ID NO: 5887 - RNA, 82 nt, Homo Sapiens; identical to SEQ ID NO: 5831

SEQ ID NO: 5888 - RNA, 82 nt, Homo Sapiens; identical to SEQ ID NO: 5831

SEQ ID NO: 5889 - RNA, 82 nt, Homo Sapiens; identical to SEQ ID NO: 5831

SEQ ID NO: 5890 - RNA, 82 nt, Homo Sapiens; identical to SEQ ID NO: 5831

SEQ ID NO: 5891 - RNA, 82 nt, Homo Sapiens; identical to SEQ ID NO: 5831

SEQ ID NO: 5892 - RNA, 82 nt, Homo Sapiens; identical to SEQ ID NO: 5831

SEQ ID NO: 5893 - RNA, 82 nt, Homo Sapiens; identical to SEQ ID NO: 5831

SEQ ID NO: 5894 - RNA, 82 nt, Homo Sapiens; identical to SEQ ID NO: 5831

SEQ ID NO: 5895 - RNA, 82 nt, Homo Sapiens; identical to SEQ ID NO: 5831

SEQ ID NO: 5896 - RNA, 82 nt, Homo Sapiens; identical to SEQ ID NO: 5831

SEQ ID NO: 5897 - RNA, 82 nt, Homo Sapiens; identical to SEQ ID NO: 5831

SEQ ID NO: 5898 - RNA, 82 nt, Homo Sapiens; identical to SEQ ID NO: 5831

SEQ ID NO: 5899 - RNA, 82 nt, Homo Sapiens; identical to SEQ ID NO: 5831

SEQ ID NO: 5900 - RNA, 82 nt, Homo Sapiens; identical to SEQ ID NO: 5831

SEQ ID NO: 5901 - RNA, 82 nt, Homo Sapiens; identical to SEQ ID NO: 5831

SEQ ID NO: 5902 - RNA, 82 nt, Homo Sapiens; identical to SEQ ID NO: 5831

SEQ ID NO: 5903 - RNA, 82 nt, Homo Sapiens; identical to SEQ ID NO: 5831

SEQ ID NO: 5904 - RNA, 82 nt, Homo Sapiens; identical to SEQ ID NO: 5831

SEQ ID NO: 5905 - RNA, 82 nt, Homo Sapiens; identical to SEQ ID NO: 5831

SEQ ID NO: 5906 - RNA, 82 nt, Homo Sapiens; identical to SEQ ID NO: 5831

SEQ ID NO: 5907 - RNA, 82 nt, Homo Sapiens; identical to SEQ ID NO: 5831

SEQ ID NO: 5908 - RNA, 82 nt, Homo Sapiens; identical to SEQ ID NO: 5831

SEQ ID NO: 5909 - RNA, 82 nt, Homo Sapiens; identical to SEQ ID NO: 5831

SEQ ID NO: 5910 - RNA, 82 nt, Homo Sapiens; identical to SEQ ID NO: 5831

SEQ ID NO: 5911 - RNA, 82 nt, Homo Sapiens; identical to SEQ ID NO: 5831

SEQ ID NO: 5912 - RNA, 82 nt, Homo Sapiens; identical to SEQ ID NO: 5831

SEQ ID NO: 5913 - RNA, 82 nt, Homo Sapiens; identical to SEQ ID NO: 5831

SEQ ID NO: 5914 - RNA, 82 nt, Homo Sapiens; identical to SEQ ID NO: 5831

SEQ ID NO: 5915 - RNA, 82 nt, Homo Sapiens; identical to SEQ ID NO: 5831

SEQ ID NO: 5916 - RNA, 82 nt, Homo Sapiens; identical to SEQ ID NO: 5831

SEQ ID NO: 5917 - RNA, 82 nt, Homo Sapiens; identical to SEQ ID NO: 5831

SEQ ID NO: 5918 - RNA, 82 nt, Homo Sapiens; identical to SEQ ID NO: 5831

SEQ ID NO: 5919 - RNA, 82 nt, Homo Sapiens; identical to SEQ ID NO: 5831

SEQ ID NO: 5920 - RNA, 82 nt, Homo Sapiens; identical to SEQ ID NO: 5831

SEQ ID NO: 5921 - RNA, 82 nt, Homo Sapiens; identical to SEQ ID NO: 5831

SEQ ID NO: 5922 - RNA, 82 nt, Homo Sapiens; identical to SEQ ID NO: 5831

SEQ ID NO: 5923 - RNA, 82 nt, Homo Sapiens; identical to SEQ ID NO: 5831

SEQ ID NO: 5924 - RNA, 82 nt, Homo Sapiens; identical to SEQ ID NO: 5831

SEQ ID NO: 5925 - RNA, 82 nt, Homo Sapiens; identical to SEQ ID NO: 5831

SEQ ID NO: 5926 - RNA, 82 nt, Homo Sapiens; identical to SEQ ID NO: 5831

SEQ ID NO: 5927 - RNA, 82 nt, Homo Sapiens; identical to SEQ ID NO: 5831

SEQ ID NO: 5928 - RNA, 82 nt, Homo Sapiens; identical to SEQ ID NO: 5831

SEQ ID NO: 5929 - RNA, 82 nt, Homo Sapiens; identical to SEQ ID NO: 5831

SEQ ID NO: 5930 - RNA, 82 nt, Homo Sapiens; identical to SEQ ID NO: 5831

SEQ ID NO: 5931 - RNA, 82 nt, Homo Sapiens; identical to SEQ ID NO: 5831

SEQ ID NO: 5932 - RNA, 82 nt, Homo Sapiens; identical to SEQ ID NO: 5831

SEQ ID NO: 5933 - RNA, 82 nt, Homo Sapiens; identical to SEQ ID NO: 5831

SEQ ID NO: 5934 - RNA, 82 nt, Homo Sapiens; identical to SEQ ID NO: 5831

SEQ ID NO: 5935 - RNA, 82 nt, Homo Sapiens; identical to SEQ ID NO: 5831

SEQ ID NO: 5936 - RNA, 82 nt, Homo Sapiens; identical to SEQ ID NO: 5831

SEQ ID NO: 5937 - RNA, 82 nt, Homo Sapiens; identical to SEQ ID NO: 5831

SEQ ID NO: 5938 - RNA, 82 nt, Homo Sapiens; identical to SEQ ID NO: 5831

SEQ ID NO: 5939 - RNA, 82 nt, Homo Sapiens; identical to SEQ ID NO: 5831

SEQ ID NO: 5940 - RNA, 82 nt, Homo Sapiens; identical to SEQ ID NO: 5831

SEQ ID NO: 5941 - RNA, 82 nt, Homo Sapiens; identical to SEQ ID NO: 5831

SEQ ID NO: 5942 - RNA, 82 nt, Homo Sapiens; identical to SEQ ID NO: 5831

SEQ ID NO: 5943 - RNA, 82 nt, Homo Sapiens; identical to SEQ ID NO: 5831

SEQ ID NO: 5944 - RNA, 82 nt, Homo Sapiens; identical to SEQ ID NO: 5831

SEQ ID NO: 5945 - RNA, 74 nt, Homo Sapiens
aguuuugcaccugagacagauagccucacucgccucacccuaguccugguggcauuugucucaggugcaaaauu

SEQ ID NO: 5946 - RNA, 101 nt, Homo Sapiens
auaagcugcucuaauugccaagaauucacaugugguuguaugcagcuuuacugggagacugaaguguaucugcaugugauucugcugugauggacacuugu

SEQ ID NO: 5947 - RNA, 101 nt, Homo Sapiens; identical to SEQ ID NO: 5946

SEQ ID NO: 5948 - RNA, 109 nt, Homo Sapiens
auaagcugcucuaauugccaagaauucacaugugguuguaugcagcuuuacugggagacugaaguguaucugcaugugauucugcugugauggacacuuguaaguuugu

SEQ ID NO: 5949 - RNA, 109 nt, Homo Sapiens; identical to SEQ ID NO: 5948

SEQ ID NO: 5950 - RNA, 63 nt, Homo Sapiens
auacuuacuagcauauuauauagcucuaagaguguagaguuauaugaugugcuagugaagugu

SEQ ID NO: 5951 - RNA, 89 nt, Homo Sapiens
auagaaaucauuauugucuaggcuuuuggagaagcauaugcugugaaaaugaucacggcugugcuccuaaaagccagucauguuucugu

SEQ ID NO: 5952 - RNA, 100 nt, Homo Sapiens
auagacaggucucacucuguugcccaggcuggagugcaguggugugacuguagcucacuauagccaccaaguccugggcucaagcgauccuccugucuau

SEQ ID NO: 5953 - RNA, 107 nt, Homo Sapiens
auaugcugaguugggacaggagcuaaggauagaggugaggaaacccgcagacaacagcgacaugcuccucaucuuugagucccagcgaaccuuuccacugugugugu

SEQ ID NO: 5954 - RNA, 69 nt, Homo Sapiens
aucaaucacacugggugaccuuuacucccugucaggucaguaagagucacccaguguaaacagcaugau

SEQ ID NO: 5955 - RNA, 97 nt, Homo Sapiens
aucaguggcauauuagauucucauaggaaugugaaccguguugugaccaugcgagggaucuagguugcaugcucuucaugagaaucuaauaucugau

SEQ ID NO: 5956 - RNA, 106 nt, Homo Sapiens
aucaucaggcauuagauucucauaaggagcacacaaccuagauugcuagcaggcacaguucacaauaggguucguucuccugugagaauggcaugccgcugcugau

SEQ ID NO: 5957 - RNA, 75 nt, Homo Sapiens
auccugggaaggacccuacccagucauuuuaucuaccccaaccaugguuaaaguggcuggaguggagucuuggau

SEQ ID NO: 5958 - RNA, 78 nt, Homo Sapiens
aucgucugagcccaggaguuugaggcugcagugagcuacaaucacaccccugcacucaagccuggguuacagagugau

SEQ ID NO: 5959 - RNA, 80 nt, Homo Sapiens
aucugcauguuuuguugucucuguguuguacaguggaggagaaacaaugcauuuuggggacagcuaggacccaugcagau

SEQ ID NO: 5960 - RNA, 76 nt, Homo Sapiens
aucugucuuuccaagccuuccccgggaucagaguuuuuaaggauaauuugguggggagaggcuugggaaguggggu

SEQ ID NO: 5961 - RNA, 87 nt, Homo Sapiens
aucuuguacauuuuccccacacuuggaaucagccauuccuccagggagugcagguucacaggcugggcucuaagagaauuauaaggu

SEQ ID NO: 5962 - RNA, 110 nt, Homo Sapiens
augaagugagucacauuggcuacuggugaggaaggagcagaguugugggcugagacugaugcuguucagcaucugucuuccuugucaccaacauagaugaccacuagcau

SEQ ID NO: 5963 - RNA, 68 nt, Homo Sapiens
augaauccguuuuuaugaaauguccaaaauaggcaaaucuauggacagaaaguagaaagcagauucgu

SEQ ID NO: 5964 - RNA, 79 nt, Homo Sapiens
augacagcaagacacuggcccuggaauccuccgugucacaugugggcugcugacaggaagaaugugcuuuuguuguugu

SEQ ID NO: 5965 - RNA, 96 nt, Homo Sapiens
augacugugcugcaggaggcggcucagugugaagaacuacggguuuccugauguugaagcucagaauuagccacacugaccuucucagucaugcau

SEQ ID NO: 5966 - RNA, 83 nt, Homo Sapiens
augaguauugaucugucccagccugugcauugcuccgaggcaguucugaguggaugauguacagaugggauuccucagcucau

SEQ ID NO: 5967 - RNA, 92 nt, Homo Sapiens
augaguccacagccucgggggacgauuguuccuguuucuguagaauugauuugaaacuugaauaaugucccacugggaggcaaggugaucau

SEQ ID NO: 5968 - RNA, 91 nt, Homo Sapiens
augaugccaggacugcagcuucagggacuuguggcagaugcacagggugccucuggcucccuggagcuccacacugcagucccagcucugu

SEQ ID NO: 5969 - RNA, 131 nt, Homo Sapiens
augcauggggguacacaggggacacaaugcaguguuggugggaaauagucauugagcacuucuccuuuccucucaugugaaauguucagagaaucaccaccagacacucccgugugaaaauuuguaugcau

SEQ ID NO: 5970 - RNA, 113 nt, Homo Sapiens
augccuaauuuagcacauaguuccuguccccaaaaucuaauaaacucagaaguaauaaauuuucuggguuuuuguggguuugcccucugagcuaggguaguuaaaaguugcau

SEQ ID NO: 5971 - RNA, 93 nt, Homo Sapiens
augcucaaguauacugaugucaccaggcagaauucagauaauggugaccagagauccugucugagcaaccuggugacauuagauaccagacau

SEQ ID NO: 5972 - RNA, 101 nt, Homo Sapiens
auggcaugcacguguuggaaguuaguggaggcuaucuccccaguggucaaaggaggucuugcuggagaaauuauauuuuacuaacuugaagcagcagcugu

SEQ ID NO: 5973 - RNA, 78 nt, Homo Sapiens
auggcgugaacccgggaggcggagcuugcagugagccgagaucgagccacugcacuccagccugggcaacagagcgau

SEQ ID NO: 5974 - RNA, 87 nt, Homo Sapiens
auggguagcaugaacuaagguagauaaaggcuucacgugguguuuggcauggcguagguguagauuggaccucaguuuucugcccau

SEQ ID NO: 5975 - RNA, 78 nt, Homo Sapiens
auguccaaagacucaacaguuagacuacuuuucuuccacucauuuuaaagaaaaaugucuaugaaguguuuuggauau

SEQ ID NO: 5976 - RNA, 73 nt, Homo Sapiens
auguuaugauuguuucauuuguuggaaauaaggaaaacuugcaugguuugaauuguggaacaauagguggugu

SEQ ID NO: 5977 - RNA, 95 nt, Homo Sapiens
auguucugaaguacugaggguuagggcuucaacuuacgaauuuggugaguucacaguucagccuguaacacauuucuucaggauuuccagagcgu

SEQ ID NO: 5978 - RNA, 108 nt, Homo Sapiens
auuacuagguuuaaauaagaacagaugcuugcuuugguucaaguuaggcaugccucugaugcauuucuuaauaccaaggcaaaucucugagggcuuagacuuaguagu

SEQ ID NO: 5979 - RNA, 86 nt, Homo Sapiens
auuaugugcuguaguauguauauaguauuuuuagugaaaauauucauauaaaauauuacuuaaaucauuucuacauugcacaaaau

SEQ ID NO: 5980 - RNA, 93 nt, Homo Sapiens
auuauucugaugaaaauccacaaugucuuugagcuucugguuguguaaugcugggguuuaaagucaccauuuguggguuuggcaucaauuaau

SEQ ID NO: 5981 - RNA, 125 nt, Homo Sapiens
auuguauugcagcagguuggcagccucaguaaaucuccauuuguaaaugugacagucagcagaaucuccaguuacagucaacucaaagcaagcaggggcaugccacauacauguucauauauagu

SEQ ID NO: 5982 - RNA, 74 nt, Homo Sapiens
auuuccugcugccagcuuaauacucaccagggcagauucacaccaaguugggguuucaguggcagucaggaagu

SEQ ID NO: 5983 - RNA, 79 nt, Homo Sapiens
caaagagguguagaaucuggguugguccuucaaggcagcucauugcagcuacuggccuccagugaaacaggucucuuug

SEQ ID NO: 5984 - RNA, 106 nt, Homo Sapiens
caaaucaguggcauauuagauucucauaggaaugugaaccguguugugaccaugcgagggaucuagguugcaugcucuucaugagaaucuaauaucugaugaucug

SEQ ID NO: 5985 - RNA, 71 nt, Homo Sapiens
caaauuuggugugcuuucuccuuugccugcugcuucuuucaaguaggacauggagacaacagccaaauuug

SEQ ID NO: 5986 - RNA, 98 nt, Homo Sapiens
caacaggugcaaguguuaaaggguaugauccuucaguggaacaaagccuccgugucaccugagggauagcaacaugccuacaagcacugcaagaguug

SEQ ID NO: 5987 - RNA, 101 nt, Homo Sapiens
caacccaguaaguguccccagucaaugcuucucuccauaggagaccuguaaaugggcgguggggggaggaauuuucuggucucacacacuauuauggguug

SEQ ID NO: 5988 - RNA, 88 nt, Homo Sapiens
caagcagugaagggugcagaucauggauagagcuuucaagaaguuuguucuaguucuucuccugaaacuggaccucccuccuagcuug

SEQ ID NO: 5989 - RNA, 92 nt, Homo Sapiens
caaguugugaccuucccaguccucucuccauuugcagaucagcaagcuucugucagcaaggagggguggacaaugaaacuggguucagcuug

SEQ ID NO: 5990 - RNA, 96 nt, Homo Sapiens
caaguuuggucaaggggugaguguguccgacuccaaggagcaucuccguuucugagugggaacucucaugacacugugucccuugccucaggcuug

SEQ ID NO: 5991 - RNA, 101 nt, Homo Sapiens
caaugggggacauuugccaagaguugagaaugcuguaauuggaggccugagaggugggucccaauucuuacauuuuccauuccacaaacugucuccuuuug

SEQ ID NO: 5992 - RNA, 72 nt, Homo Sapiens
cacaauccucagcguguuaacugaagccuuguugaguuuaacaaagcugccauugaagaucuggggaaagug

SEQ ID NO: 5993 - RNA, 87 nt, Homo Sapiens
cacagccaguuucuuugaugacucaaaacguacuuugugaucuugccaagcuuugagaucaucguuacaagcagcauuuugguugug

SEQ ID NO: 5994 - RNA, 84 nt, Homo Sapiens
caccccguucauguaacacgggccugaggucagcaguagaggaccaguauugguuuuggccccagccucugcguggauggauug

SEQ ID NO: 5995 - RNA, 96 nt, Homo Sapiens
cacccgugccugggauucucuaagacaaaggagaagucuuaaagccuuacagcgucuuaagucuuagaucacauuuagagagacccgguacaggug

SEQ ID NO: 5996 - RNA, 106 nt, Homo Sapiens
caccugccuauauuacauucauuuugaugguuuguaucucaaaggaguacagugaacgaaacuuguuuaaagauacaccggaaagaaaaagagaagaggcagagug

SEQ ID NO: 5997 - RNA, 90 nt, Homo Sapiens
caccugucaugccaguuacuuggggggcuaaggugggaggauuagugagcugugauucugccacugcauuccagccugggugacagagug

SEQ ID NO: 5998 - RNA, 100 nt, Homo Sapiens
cacgagcaguuugugucacagauggccggaagagacucuuuugccugguuacaggcauguuuuucugccauccuguugaauuuucccaucaacuccuuug

SEQ ID NO: 5999 - RNA, 102 nt, Homo Sapiens
cacgcgucuuuguggucaccuggcuuaggaagcucacaagguccucaucauuuggagguguuucccugugagugcccucagcccuaggcuuucuuacgugug

SEQ ID NO: 6000 - RNA, 81 nt, Homo Sapiens
cacggcuauuaaguagcagaacugggcuugaauucagaucugcuucucaguccaguguucucugcucuguaacuggcugug

SEQ ID NO: 6001 - RNA, 106 nt, Homo Sapiens
cacuaggcuagacauacaaagaccccuugcccguggcucccauuucaaauauaucucaugaccagggugugggagcacgacagaggagguaagaguuuaaacugug

SEQ ID NO: 6002 - RNA, 98 nt, Homo Sapiens
cacucccugagugaagguguguguguuaggaaaugugcuuacugggugaacacaacagagguguuccccaccucaugauacccacagucuagggagug

SEQ ID NO: 6003 - RNA, 84 nt, Homo Sapiens
cacucuguaauaaagaacuuggaaagggagguuccaagauggccaaauaugaacagcuccagucuacagcccccagcgugagug

SEQ ID NO: 6004 - RNA, 76 nt, Homo Sapiens
cacugccaacugaggcaggagggcucaggagagucuucgccucuuguacccuccuugggccucuccaaaaccagug

SEQ ID NO: 6005 - RNA, 97 nt, Homo Sapiens
cacuguagggcaguaaggaaagaauguucuuuuucaaaaauagucugagccaauuggauguuuuuguggaauauuuuuuuaauuugcccugcaugug

SEQ ID NO: 6006 - RNA, 75 nt, Homo Sapiens
cacugugugauuugauuccaagcuacccaugaagaaacccagacucagaggucacuugccuagggucacacagug

SEQ ID NO: 6007 - RNA, 73 nt, Homo Sapiens
cacuugaaccuggaaggcagggguugcagugagcugagauugugccauugcacuccagccugggcaacaagug

SEQ ID NO: 6008 - RNA, 96 nt, Homo Sapiens
cacuuucaugucugccuucuuugcuggaaggugccucccuauuccacagacuuuggaucagugggugugggggaauccaaggcagaccaugaaaug

SEQ ID NO: 6009 - RNA, 111 nt, Homo Sapiens
cagaagggguuuuuaucaaaaauauguagauucuacuacaauauuuuagcuaaagaagaagaaguaguaguagcaguaguagucaguauuuuugacccugacccaacucug

SEQ ID NO: 6010 - RNA, 70 nt, Homo Sapiens
cagaauguuugcaucuauucacaugugcaucagcagugcauuuguaguuaaauguguaguuaacguucug

SEQ ID NO: 6011 - RNA, 112 nt, Homo Sapiens
cagacccucucucuuucccaggcuuccuguccuucagcaaggccaccugagaacugaauuguaaauuccagccuugcaaggaaggggaggaggcugaaagacaagauaaaug

SEQ ID NO: 6012 - RNA, 91 nt, Homo Sapiens
cagagucucgcucuguugcucaggcuggagugcaguggugcaaucuuggcucacugcaaccuccaucuccuggguuuaagcgauucucaug

SEQ ID NO: 6013 - RNA, 84 nt, Homo Sapiens
cagauaaccagacacaccccugggcugggcacacaguuccuuauuuggguuuugugguuuucccaggugguagcugggacucug

SEQ ID NO: 6014 - RNA, 92 nt, Homo Sapiens
cagaugccuccuucgggagccacaggauccagagagucaaugaaaguaaaacuucaggacugucuggauuuauuacgccagggaggaaguug

SEQ ID NO: 6015 - RNA, 108 nt, Homo Sapiens
cagauugcacgaacauuucauuuuucacacagggucaccagaauaccaucaauuuuuugguaucacugucaaaagugauccuagcaccuucugaaauaacgugagcug

SEQ ID NO: 6016 - RNA, 110 nt, Homo Sapiens
cagccucaagugauccaccaccucagcuucccaaagugcugggauuacaggcaugauccaccacgccuggucccauuguucuuuacaucugaugggcugcuuuuggguug

SEQ ID NO: 6017 - RNA, 130 nt, Homo Sapiens
cagcgcggcucccgccacccucaauaaauguugcuuggaguggaccgaggcucugcaggaaugcagggagggccgggcuccgccccaggguuauuucuaaguugaggacaggagguugugaguucugcug

SEQ ID NO: 6018 - RNA, 130 nt, Homo Sapiens; identical to SEQ ID NO: 6017

SEQ ID NO: 6019 - RNA, 130 nt, Homo Sapiens; identical to SEQ ID NO: 6017

SEQ ID NO: 6020 - RNA, 111 nt, Homo Sapiens
cagcugggacugcaggggcacaacaucacgccuggcuaauuuuuguauuuucuguagggcuaggauuucacaguguuacccaggcuggucucaaaauccugggcucaaaug

SEQ ID NO: 6021 - RNA, 80 nt, Homo Sapiens
cagcuugcagcacacacagcauuggucaugaggucagcugcucucugacccacuugcucagaguuguuugcugccuguug

SEQ ID NO: 6022 - RNA, 80 nt, Homo Sapiens; identical to SEQ ID NO: 6021

SEQ ID NO: 6023 - RNA, 98 nt, Homo Sapiens
caggcaaagguggcuuaaugaagagcaagggguuuuuagaugacauggugguaguguuauuaauaaacucuuuuuccucuuuaugcagcugguuccug

SEQ ID NO: 6024 - RNA, 130 nt, Homo Sapiens
caggcagcaggaugaucucuuguggaguaaaaugucagguguuuuuuuuuuuaagaaaucgauuuuuaguugugacgucauuuggcaggcuguccacgguaucacuuucugcuuauuuuuaaaaggucug

SEQ ID NO: 6025 - RNA, 94 nt, Homo Sapiens
caggcugguucgucguuucugccucuccauucuugucuuuuuaauucuuuguguuauuugagauggaguuugagagggaauaugaacaagccug

SEQ ID NO: 6026 - RNA, 90 nt, Homo Sapiens
cagggagaagagcugugugcugugaugugguuuauaaauuaccauuuggaaggagcugcacagcacagcagccugcaacuacucuuccug

SEQ ID NO: 6027 - RNA, 120 nt, Homo Sapiens
cagguacuccaugugauauaugguuccacaauccucagcguguuaacugaagccuuguugaguuuaacaaagcugccauugaagaucuggggaaagugaagaaguugcaacagaguuuug

SEQ ID NO: 6028 - RNA, 79 nt, Homo Sapiens
cagguaugacaugugccacugugucugaaauuccugagcaccgagggccgcuucaggcaccaggcacuuugccaaccug

SEQ ID NO: 6029 - RNA, 97 nt, Homo Sapiens
caggugugcgccaccacacgugacugggaagccuucugguuuuaagauggcuuuagaaugaaaggcaguuccuagcaccuguggucaaucacaucug

SEQ ID NO: 6030 - RNA, 89 nt, Homo Sapiens
cagguguggacuaccaugccuggcuaauuuuuguauuuuugguagaaacaggguuuuaccauguuggccaggcuggucuugaacuucug

SEQ ID NO: 6031 - RNA, 92 nt, Homo Sapiens
caguaaacauaaguuccucaggagaguuugaugugugucaggugcuuagaacagggccugauauauaaucagcccaugaugagcuauuacug

SEQ ID NO: 6032 - RNA, 76 nt, Homo Sapiens
cagugggaaggggggccgauacacuguacgagagugaguagcaggucucacagugaaccggucucuuucccuacug

SEQ ID NO: 6033 - RNA, 101 nt, Homo Sapiens
cauaaugaguccacagccucgggggacgauuguuccuguuucuguagaauugauuugaaacuugaauaaugucccacugggaggcaaggugaucauaaaug

SEQ ID NO: 6034 - RNA, 68 nt, Homo Sapiens
cauagcugucuggaggcgcaguuuucagaaaccauagacaucugagaaauauguuucuggcuuuuaug

SEQ ID NO: 6035 - RNA, 66 nt, Homo Sapiens
cauauaugucugguauucuuggggucuaguagucuaguauaauacacauagccuaggacauguaug

SEQ ID NO: 6036 - RNA, 130 nt, Homo Sapiens
caucaaagaauaaauaagcugcucuaauugccaagaauucacaugugguuguaugcagcauuacugggaaauugaaguguaucugcaugugauucugcugugauggacacuuguaaguuuguuccuggag

SEQ ID NO: 6037 - RNA, 131 nt, Homo Sapiens
caucacccagugguucucucagcaacagacauguccaguggaccguaguguugugacggucgcccaucugcgcccaguaccucggaucaugcggaacauguugucaaagcugcagauugccugugacaacg

SEQ ID NO: 6038 - RNA, 79 nt, Homo Sapiens
caucagcuauuccuguucuagaaagggcacucuggcugcaauguggaggagggagugacuggaggaagggagguaagug

SEQ ID NO: 6039 - RNA, 60 nt, Homo Sapiens
caugaaauuuagugugauuauuuuuucuacuuuuuaaucaucauuauuuugaaguuuaug

SEQ ID NO: 6040 - RNA, 130 nt, Homo Sapiens
cauggggucgugucacugggcuccucagggaaggcaguagguuguauaguuaucuuccgaggggcaacaucacugcccugaaaccacacaaccuacuaccucaccccgccaggcccggccuugcacugcg

SEQ ID NO: 6041 - RNA, 94 nt, Homo Sapiens
cauguuggccagacuggucuguaacuccagacuucaggugaucugcccaccuuggccucccaaagugcugggauuacaggccugagccaccaug

SEQ ID NO: 6042 - RNA, 131 nt, Homo Sapiens
cauuaaaacucaccaucaaauagauguaaucuuauuaauuacacauuuuguauuuuaauuauuucaaggagugaagaaaacaggguguuuuuguuuuuguaguucugauuacucauuuaugcauuguuuug

SEQ ID NO: 6043 - RNA, 86 nt, Homo Sapiens
cauuagauucucauaagagcccaaacccuauugugagcugcacaugcaagggaucuagguugugcgcuccuuaugagaaucuaaug

SEQ ID NO: 6044 - RNA, 117 nt, Homo Sapiens
cauuuuaguaaugcucagcuggaccaguguuaguuauauuugagucagaaaaauguuguuuuucaacuugcuuuauaaucuccugcaucuaucuccugcuguagcaucacgaaggug

SEQ ID NO: 6045 - RNA, 93 nt, Homo Sapiens
ccaaguagaagcaaacuguaguuugaugcuagaacacuauucuuugagaggguaugugugauacucgaaaugcagucauggcucacggcuugg

SEQ ID NO: 6046 - RNA, 110 nt, Homo Sapiens
ccaauccccaaccccugcagugcuuugauuaugagaaaguucugcaugacuuagcauaacugcucuuuucuaaaagccucugcaauuagauccaaaggguugggguuugg

SEQ ID NO: 6047 - RNA, 120 nt, Homo Sapiens
ccacaccagaggcugugaccauggcuaguagacaguggcaacauagucauccccaagaugcuaaucuucugcuggaacugucauacguuaucauggucaauguaaaccugguuugugugg

SEQ ID NO: 6048 - RNA, 94 nt, Homo Sapiens
ccacagugggggugcccgggcugggucccacuggggaagcucaaggcagcccuggccuuucccucauucuccacccagucaggccccugcgugg

SEQ ID NO: 6049 - RNA, 90 nt, Homo Sapiens
ccacguggauuacugggcuccucucaguguggaagcugauuuccaacaaggagcauucaaagauuaggaguucccaguguucauaagugg

SEQ ID NO: 6050 - RNA, 80 nt, Homo Sapiens
ccagagagucucuccagguacgccacacagucuuugagcugugucagagcuggauuguuuaccuggggcuggcuguuugg

SEQ ID NO: 6051 - RNA, 106 nt, Homo Sapiens
ccagaggcugugaccauggcuaguagacaguggcaacauagucauccccaagaugcuaaucuucugcuggaacugucauacguuaucauggucaauguaaaccugg

SEQ ID NO: 6052 - RNA, 111 nt, Homo Sapiens
ccagcugccacccuucuacccaaccccaucucauagaacucacaacaaccuuguugggagaaaaggaggggauacaggggcuuaaagagggggaaauaaccauauagcugg

SEQ ID NO: 6053 - RNA, 97 nt, Homo Sapiens
ccaggccugaccugucucuugaaggaguauuuguguugaagaugggugguaacguucagcaaaagccaugcccaggagacaggcacaguacccaugg

SEQ ID NO: 6054 - RNA, 111 nt, Homo Sapiens
ccaggccugccgguagguuuagaaugaggucugugucacugugguauuacgauauuuugacugguuauuauaaccacagugucacagaguccaucaaaaacccaugccugg

SEQ ID NO: 6055 - RNA, 89 nt, Homo Sapiens
ccagggaaaguaguaaguuguauaguuaucuucuaauuggggccuaauaucccuaccccacaacaauacaacuuacuaccucacccugg

SEQ ID NO: 6056 - RNA, 93 nt, Homo Sapiens
ccaguauauuucugcagucugguauguuuuucccccuaagaaccucagcugagaaauaaagcagguuaacaaagcuguaugaaaugucacugg

SEQ ID NO: 6057 - RNA, 102 nt, Homo Sapiens
ccaguauuguguggggaguguuuugaggucaucuaaugguguugucuauucuucaguagcaacuccaacacccucuacauuugcuaucaccacacaaccugg

SEQ ID NO: 6058 - RNA, 75 nt, Homo Sapiens
ccaguucuccuuuaguguucaggcucaaaugaaaggccacuuucagcaaguuuuccugacauugucggagacugg

SEQ ID NO: 6059 - RNA, 95 nt, Homo Sapiens
ccaucucugcuuauuccucugccacgucuuucccuucuccucucugcucucauaaagaagaaugggagaugaaaguggaggggcagcugaggugg

SEQ ID NO: 6060 - RNA, 107 nt, Homo Sapiens
ccaucuggcagaacacugggcaaaagagguucugauucuggccuguuacuugcuguacaaacuugcacaaggccagagaggacucucuuuucccaucugcaaagugg

SEQ ID NO: 6061 - RNA, 100 nt, Homo Sapiens
ccaucuucaguggcauugggccuuggcugggaugcugaguuauccacuggagcaucggcaguacaggcaggcacagaggcaguggauccaucggaggugg

SEQ ID NO: 6062 - RNA, 108 nt, Homo Sapiens
ccaugcuaaauaaaggagagcuuagguagacagacuugaccuuggagaggccagagaagccuucucugaggacagaaaguuugugcugaagucugaaguguaaguagg

SEQ ID NO: 6063 - RNA, 77 nt, Homo Sapiens
ccauguuaauuuccugguagugaugacagcacugugauuauauaggaguguguccuugguguuugggaauuacaugg

SEQ ID NO: 6064 - RNA, 118 nt, Homo Sapiens
ccauuuuuuuguaggucagaagugguugcaaacuggauuuuuagacucuuccuguugggggucucggacauuugcucuuuuccacagcggccaauucuucagagccacaaagaacugg

SEQ ID NO: 6065 - RNA, 86 nt, Homo Sapiens
cccaaagcucacaguuuggcacugaaucauauacaaucucguaguuuggauggcugugugugacugcagacugcuagacagcaggg

SEQ ID NO: 6066 - RNA, 98 nt, Homo Sapiens
cccaaccccugcagugcuuugauuaugagaaaguucugcaugacuuagcauaacugcucuuuucuaaaagccucugcaauuagauccaaaggguuggg

SEQ ID NO: 6067 - RNA, 94 nt, Homo Sapiens
cccaagguuacuugguaaguaaagagagaagccagaagccuggggccuccugacggcuccugcuucucuuuuuacuaaggucuucugccauggg

SEQ ID NO: 6068 - RNA, 81 nt, Homo Sapiens
cccacagguaagaaccuuguguuuuccagauucugaguguggcucagcucgugaaugcaguggcacaaggcacucuguggg

SEQ ID NO: 6069 - RNA, 74 nt, Homo Sapiens
cccacaggugauucuguugugcagccaugguuggcaggcuguucacggugcuguucaacagguccugcuguggg

SEQ ID NO: 6070 - RNA, 100 nt, Homo Sapiens
cccagaacaaagaccucuagccaacauguaagcaccuagaccaugguuucccauccuuaucauuguuaacauuuuggcuagauaguucuuuguugugugg

SEQ ID NO: 6071 - RNA, 87 nt, Homo Sapiens
cccagacagugcccguuuugagaugugaccugguggccaccaaaugccuuggccucagugcaaacuaagcagggcacacugccuggg

SEQ ID NO: 6072 - RNA, 102 nt, Homo Sapiens
cccagcaugauucauaccuguaaucuuacccauucuugauuuagaugagauuuggauuucgaguugaugcuagaauggguuaauacuuuugaggauguuggg

SEQ ID NO: 6073 - RNA, 84 nt, Homo Sapiens
cccagcccaagauugaauucugauuaaaggaggcugaauugcagagccuccuuucaucaaauucgaguuuugaauugagcuggg

SEQ ID NO: 6074 - RNA, 104 nt, Homo Sapiens
cccagguuucaguuugguagcaugaauccuuagcauuuagugacuccaguuuuggucugcugucuuucuuaaauggaugcaugaggcaaccauuggguacuggg

SEQ ID NO: 6075 - RNA, 102 nt, Homo Sapiens
cccagugacccacagguaagaaccuuguguuuuccagauucugaguguggcucagcucgugaaugcaguggcacaaggcacucugugggaguggaucuuggg

SEQ ID NO: 6076 - RNA, 84 nt, Homo Sapiens
ccccaccccaguggagcucaccuuccaguaggucuaaacugguuugauugaguuccauggaaaacaacaaagugggguaagggg

SEQ ID NO: 6077 - RNA, 75 nt, Homo Sapiens
ccccagcccggaagccuccacuaucuccagcccagacaaacccugugguccagaggaggaaugagggugcagggg

SEQ ID NO: 6078 - RNA, 110 nt, Homo Sapiens
ccccgagggugugacugagagccaguccccagcacccuuguccagauggggaccaggaggugggugaagauauuuggggucugagcucugugcugguugcccccgagggg

SEQ ID NO: 6079 - RNA, 115 nt, Homo Sapiens
cccgaccacuagcagccucuuucagucacuggaaaaugcuuacaggcaguagccaccaucauguggcacaaagugggcaucauccuagugucuaacauuuaagcugugguucugg

SEQ ID NO: 6080 - RNA, 102 nt, Homo Sapiens
cccgccucagccucucgagucacugggauuacagaugugagccaccaugcccaguuggaugcucuaaacauuaaauucuaagcaaagagaugaugaggcugg

SEQ ID NO: 6081 - RNA, 103 nt, Homo Sapiens
cccgccucagccucucgagucacugggauuacagaugugagccaccaugcccaguuggaugcucuaaacauuaaauucuaagcaaagagaugaugaggcuggg

SEQ ID NO: 6082 - RNA, 108 nt, Homo Sapiens
cccggaguuuauggucuggugagaagaucccugcucugagucacugccaagcucuagcuaugugacuuugaacagggaauuucugucccuaucuauaaaauaaacggg

SEQ ID NO: 6083 - RNA, 110 nt, Homo Sapiens
cccuaaaagugacugaauugcccaagugcuugaacauggcagagguaguuacuccuauuuugcaguuugugcacuuaaaaauuccuacagugauuguuacuuuacugggg

SEQ ID NO: 6084 - RNA, 95 nt, Homo Sapiens
cccuacuauuuucuugggaaacauccagcacauacucaaggugggagggcaguaagcuugaugguggcuagauguuucugaagacaagaguaggg

SEQ ID NO: 6085 - RNA, 81 nt, Homo Sapiens
cccucagcacagguuuuggcucuuagaauggguuuuuuaaaaaaaggaucuuucuuaauuccaggacuccugaguuggggg

SEQ ID NO: 6086 - RNA, 113 nt, Homo Sapiens
cccugaacucaggggcuucgccacugauuguccaaacgcaauucuuguacgagucugcggccaaccgagaauuguggcuggacaucuguggcugagcuccgggcgcaacaggg

SEQ ID NO: 6087 - RNA, 92 nt, Homo Sapiens
cccugccgcaggagagccacuuucagagaugcccugagugaucgucaccagcugcauccugcaaacuucaucuugcugucccuguggcuugg

SEQ ID NO: 6088 - RNA, 77 nt, Homo Sapiens
cccuggaggcaggugcagauggaggcuguuuccugucaggaugugggacuuugucuucuucugacaguuccccaggg

SEQ ID NO: 6089 - RNA, 77 nt, Homo Sapiens; identical to SEQ ID NO: 6088

SEQ ID NO: 6090 - RNA, 72 nt, Homo Sapiens
cccuggcugaggugggaucccgaggccucuccaguccccugagggugcaccacuggcccaucucacccaggg

SEQ ID NO: 6091 - RNA, 79 nt, Homo Sapiens
cccugucagagcucuccagaauaugcuuguuggagauccuucaggcaguaagggagaguuuugccuccuuacacagugg

SEQ ID NO: 6092 - RNA, 89 nt, Homo Sapiens
cccuguccugucuucgaguauuuguuuuuaaugcugggugucgaucgagacaacaagcgcucagagcaaagcaaggaugcauuacgggg

SEQ ID NO: 6093 - RNA, 110 nt, Homo Sapiens
cccuuaugggauucuggaagugguggcuacacggauguacaugagugugaaaaaaucauuaaacuguaugcucugugaagcuuacuguaucuguuauccuuccuaauggg

SEQ ID NO: 6094 - RNA, 72 nt, Homo Sapiens
cccuucagucucaguagccacauuucaagugcucaauaguuacaugugcccaguggcugcuggacugggugg

SEQ ID NO: 6095 - RNA, 80 nt, Homo Sapiens
cccuuucaaaacaaagcuuucccaggauagcccugggcagaacuccugggauugacugggcaguaauguaguugagaggg

SEQ ID NO: 6096 - RNA, 101 nt, Homo Sapiens
ccgaggcuacgugaaggaacacuuugccuggagacauuucuacugguaccuuaccaaugaggguauccaguaucuccgugauuaccuucaucugcccccgg

SEQ ID NO: 6097 - RNA, 121 nt, Homo Sapiens
ccgaugaacccagggccguucccuucauacccuuucauuaguagcucuaagauguuugauuaagguguacguuuacagaggaguugguuggugaugagcauugaacauuuggguucuucgg

SEQ ID NO: 6098 - RNA, 96 nt, Homo Sapiens
ccgcagggagaagagcugugugcugugaugugguuuauaaauuaccauuuggaaggagcugcacagcacagcagccugcaacuacucuuccugagg

SEQ ID NO: 6099 - RNA, 102 nt, Homo Sapiens
ccgguagguuuagaaugaggucugugucacugugguauuacgauauuuugacugguuauuauaaccacagugucacagaguccaucaaaaacccaugccugg

SEQ ID NO: 6100 - RNA, 95 nt, Homo Sapiens
ccgucacagcacuugcccucaauguucaucacugaagacaagcaugugauuuucucaucacauccucccacuucaaguggggcagggcagugagg

SEQ ID NO: 6101 - RNA, 95 nt, Homo Sapiens
ccguggcccguguucucuccuuuuguccccauagugugacuccgccaggaacuuggaauggcugaagacugugaaugagagucaugggucugugg

SEQ ID NO: 6102 - RNA, 78 nt, Homo Sapiens
ccuaaaacauaagugaagaucaggcuacagugcuuuucucaugacauggagccuuguuguuuguucacucauucuagg

SEQ ID NO: 6103 - RNA, 91 nt, Homo Sapiens
ccuaacaguuguuuucugaguauauuuucaugucaaauagcaaaaguagaacuuuuggaggaggugugaagaaaugaagagugacuagagg

SEQ ID NO: 6104 - RNA, 112 nt, Homo Sapiens
ccuacauguguuacacucaguguguaaauaacugugaagaggcaauugucagauagcaaauugggcaccugcuguguacgguauauugcacuggggcugacggguguguagg

SEQ ID NO: 6105 - RNA, 79 nt, Homo Sapiens
ccuaccaugacuguucucaaaguuugaaguugagcauaccgaugcgccacuccugcuucaaugcuugagaagucguagg

SEQ ID NO: 6106 - RNA, 112 nt, Homo Sapiens
ccuagaugggaucugcugcaggcaagauauucccggccucagaagcugaggggagaaccuucuguucuuccccaccuucggcuugcauuccuccuucagcaucuucuuaagg

SEQ ID NO: 6107 - RNA, 89 nt, Homo Sapiens
ccuaucacagaccugccagauuccucugguaaacugcagguucccucugccucaguuguggccagggauucugaccaggagaugauggg

SEQ ID NO: 6108 - RNA, 108 nt, Homo Sapiens
ccucagcagacaucagaaaauucaugcucggaagaaugccuacaggaaugaaaacuuaauaauugugggaaauacuugagcaaaauaucugguuucaugguauguagg

SEQ ID NO: 6109 - RNA, 90 nt, Homo Sapiens
ccucagccucccaaagugcugggauuacaggugugaaccaccaugcccggcagugauucauuucuaaacccagcuuguuaaaaggugagg

SEQ ID NO: 6110 - RNA, 80 nt, Homo Sapiens
ccucaucucuacaaaaaauacgaaaauuagcugggugugguggcauguaccuguagucccagcuauuugagagacugagg

SEQ ID NO: 6111 - RNA, 90 nt, Homo Sapiens
ccucauugguucauucggcagcuguuuauuuagaaccugccgugugcuagggcagaucugggauacagcuguggacaagggaggaugagg

SEQ ID NO: 6112 - RNA, 94 nt, Homo Sapiens
ccuccuccauccgucucccagggugccuuuguuuugaaucauuuuugauuucaauuuaagaagagaaagaagaggcugagacgaaggaaggagg

SEQ ID NO: 6113 - RNA, 83 nt, Homo Sapiens
ccuccugcugaagcuucuggauuugagaggcuuuacucuccaggagagugaagcgaguugggccagagcugagagucuggugg

SEQ ID NO: 6114 - RNA, 88 nt, Homo Sapiens
ccuccugugucccaaaacgaaaacacuccuauauuuuguagcgccuuccagaauggggcagcggaaacuaguguugggacaaaggagg

SEQ ID NO: 6115 - RNA, 69 nt, Homo Sapiens
ccugaacccaggaggcggaggcugcagugggccaagauuaagccacugcacuccagccugggcaacagg

SEQ ID NO: 6116 - RNA, 80 nt, Homo Sapiens
ccugacucugaucacaggcaaaggaauaaagucucauuucaauccugagcuucuccuaauucuuguggaucagagcuggg

SEQ ID NO: 6117 - RNA, 105 nt, Homo Sapiens
ccugagacagaguuugcucuuguugcccaggcuggaguuuaauggcacgaucuuggcuuaccacaaccucugccuccuggguucaagcaauucuccugccucagg

SEQ ID NO: 6118 - RNA, 120 nt, Homo Sapiens
ccugcccaccaacucccaggcuuauucaccaaccacuccaccagcucugacccugacuucugggguucccaucucaguccucagccugugcugcugcccccugaagagcauccuuccagg

SEQ ID NO: 6119 - RNA, 75 nt, Homo Sapiens
ccugcuguaugcuaggcauugugcaagguguuagggcugaugcuugagcacaguaccuccacaucugcaguaugg

SEQ ID NO: 6120 - RNA, 75 nt, Homo Sapiens; identical to SEQ ID NO: 6119

SEQ ID NO: 6121 - RNA, 108 nt, Homo Sapiens
ccuggaggccuuuccauauuagauauguccccuucuauaagugcaauacacuuaaugguucccucugugcuuagggagggaaguaaucuaagcagaagguuuuuaagg

SEQ ID NO: 6122 - RNA, 75 nt, Homo Sapiens
ccuggucuuuaagagugauuggaggcugggcaugguggcuuaugccuguaaucccagcacuuugggaggccaagg

SEQ ID NO: 6123 - RNA, 86 nt, Homo Sapiens
ccuguacaaagcagccuuggaccaggagggaaaaccccaaggcucugcagccucccugcuccccuccguuuaaggcuguggucagg

SEQ ID NO: 6124 - RNA, 84 nt, Homo Sapiens
ccuguccucaguaaagaacuuggaguauguuguuccucaaauaucuuuugaugaaugggugcuccaggaguuucuacugacagg

SEQ ID NO: 6125 - RNA, 89 nt, Homo Sapiens
ccuuagguuuuaucaauccuggugcccuuccauuguaucacauccuuggaucacagugauggguucaggaauagacacaugacccaagg

SEQ ID NO: 6126 - RNA, 108 nt, Homo Sapiens
ccuucaaaaaguuuguagccuaucgggguggagagauaagccaaguauccagauaaccauggcauaaggcagaauauuuucuguacuaugagagguacaaaggggagg

SEQ ID NO: 6127 - RNA, 109 nt, Homo Sapiens
ccuucaaaaaguuuguagccuaucgggguggagagauaagccaaguauccagauaaccauggcauaaggcagaauauuuucuguacuaugagagguacaaaggggaggg

SEQ ID NO: 6128 - RNA, 103 nt, Homo Sapiens
ccuuggcauucauuauuuucauuccaguucucagcacagcgcuuggcacauaguaggaacucaggaaguguuuaugggauggaauggggugaugauguugagg

SEQ ID NO: 6129 - RNA, 96 nt, Homo Sapiens
ccuuggcccugugaggcuucaccucuugagccugagaagcagaggugacaguacuggcccugguucuuagcagggggguggcgggcaggguagggg

SEQ ID NO: 6130 - RNA, 101 nt, Homo Sapiens
ccuugggggcuuaaugauucagcguggaaugaguuuuguuguuaggguggacagaaaaacccuauggcaaagucacugauuucccugagugugcccuuugg

SEQ ID NO: 6131 - RNA, 112 nt, Homo Sapiens
ccuuugaacaguggaacuggaugaaagaaaugggaucugugcagcuacuucaguuagcuggaauccuacaguucugguuucuucuuuaaugcuaguuuucccuuuucagagg

SEQ ID NO: 6132 - RNA, 74 nt, Homo Sapiens
ccuuugaacccuguguuaacaaugagaagcuuguuuauuugaaggcuggguucucauuggcccacagggguagg

SEQ ID NO: 6133 - RNA, 106 nt, Homo Sapiens
ccuuugcuuuggccuuuaacaacucaguguuuuggucuaaucuucaagaggaauuugagguucacuugaauaaguuagacuaguuugagguggguguagcuagagg

SEQ ID NO: 6134 - RNA, 97 nt, Homo Sapiens
cgaaccagguagaaguaaugugugccaggacaagagacgcacccagagccucuggccuuggucuccuauccuggcucacaagcacacuccaaguuug

SEQ ID NO: 6135 - RNA, 92 nt, Homo Sapiens
cgaaggcagcauggaagaauaggcaguauuggauuugaaaucaggagacuuggaauugaauucugccucuuccacuaccagcugugaaauug

SEQ ID NO: 6136 - RNA, 81 nt, Homo Sapiens
cgaauggaccacuggagggguucaaagauuccaguucuaauaugggaaugagccucuuugaucucuuccggggcuuuuucg

SEQ ID NO: 6137 - RNA, 131 nt, Homo Sapiens
cgagugauuuuugagguaaguauguuauuggaaaggugugaucuauauagaacccuguacaugaaaaggaggagaugccgcuaucuuggcagggaugaucauguauuugaaauaguaacucacagcauuug

SEQ ID NO: 6138 - RNA, 86 nt, Homo Sapiens
cgcacaucuguuacuccacaucagagacuucauuuuguugauaaacccuaugaauguaaggaaugugggaaggcguucagagugcg

SEQ ID NO: 6139 - RNA, 74 nt, Homo Sapiens
cgcucuuucacccaggcuggagugcaguggcaugaucucagcucacugcaaccuccaucuccuggguucaagcg

SEQ ID NO: 6140 - RNA, 76 nt, Homo Sapiens
cgcugccucucugcaggccgugugcuuugcucgguugaucuugcagagccuaagacacaggcccagagaggcagug

SEQ ID NO: 6141 - RNA, 72 nt, Homo Sapiens
cgcuugagcccaggaggcagagguugcagugagccaagauggcaccacugcacuccagccugggcaacagug

SEQ ID NO: 6142 - RNA, 74 nt, Homo Sapiens
cgcuugagcccaggaguucgaggcugcagugagcugugaucacaccacugcacuccagccugggcaacagagcg

SEQ ID NO: 6143 - RNA, 75 nt, Homo Sapiens
cgcuugcaacugaaaggcggagguugcagugaaccaagaucgcaccacugcacuccagccugggcaacaaaagcg

SEQ ID NO: 6144 - RNA, 91 nt, Homo Sapiens
cggacccugcugugagcagcucccuauuccaugacaguguguugagcucuccauugucagaggcugguaggguguucagcuagaggugccg

SEQ ID NO: 6145 - RNA, 96 nt, Homo Sapiens
cggggauucagucugugaggcgggaagcccacuaggaggacucucacuuugcugagucucucuuucccuucuuucuucuucacccaauaaacccug

SEQ ID NO: 6146 - RNA, 86 nt, Homo Sapiens
cgggugaggaaguguuauugucagggucucccuuucagaaggccuuggggccaaggggaggagcuggaauugccuuccaccgcgug

SEQ ID NO: 6147 - RNA, 112 nt, Homo Sapiens
cggugagauggcugaaagguagacaucgagaaguuuuaauauucagaaucuuuucuucucaagacgcugaauguaaucuuaguuguaaauacccaucaccugccagucaccg

SEQ ID NO: 6148 - RNA, 84 nt, Homo Sapiens
cgucacggaaugcuguccugaucccuagcauuuacucacaugcugugcuuagugcuugaccaugugguggcagauucugugaug

SEQ ID NO: 6149 - RNA, 105 nt, Homo Sapiens
cgucuaggugaaaugagcuguguaguccuuuagagccucuggacagaagguaaugcucuuaauccagugauucucgagggcagaauggaggauuugcacuagaug

SEQ ID NO: 6150 - RNA, 131 nt, Homo Sapiens
cuacucuggaggcugaggcaggagaaucgcuuuaacccgggaggcagagguuguggugagccgagaucgcgccauugcacuccagccugggcaacaagagcggaauucugucucaaaaaaaaaaaagagag

SEQ ID NO: 6151 - RNA, 95 nt, Homo Sapiens
cuacuguuguggcuuuugcaaauuacuaaauuucucugugacuacuuuuccauuucuuaaguaauuugguugguuuccaaaagucaauaaugugg

SEQ ID NO: 6152 - RNA, 95 nt, Homo Sapiens
cuagagucccccucagcugugggggagcuuucaaauuugaaaucaggagacucgaauuccaguuuuuccuaccccuuagugcugugggacuuuag

SEQ ID NO: 6153 - RNA, 73 nt, Homo Sapiens
cuagcugcugccagccaagcugcuaccagaccagcuccugcggaacuggcuguggcauuggugguggcauugg

SEQ ID NO: 6154 - RNA, 99 nt, Homo Sapiens
cuagggugcacaguuuuuaagaaggcucgcucucucagggggaccaucccgcacuugcaugcccuugagaaugagguccuccuuaaauauucacucugg

SEQ ID NO: 6155 - RNA, 100 nt, Homo Sapiens
cuaugcccagcauuggaaagaguagaggcccuuacuagcacaccucaaaucaaacugggguugcagcagaccuuuugccuucuuuagaggcuggaaauag

SEQ ID NO: 6156 - RNA, 93 nt, Homo Sapiens
cucacccguucuacuggcaacuggaguuuguucaagaaauaccugaguugguucuuuaacugucgaguucgauuguccaaguggaaggguggg

SEQ ID NO: 6157 - RNA, 74 nt, Homo Sapiens
cucagacucaccaaacagucugcuucuuaccccaguguaagcacugaacaggcagguggguguaugggucugag

SEQ ID NO: 6158 - RNA, 73 nt, Homo Sapiens
cucagagggcuuggucaccucugccaugaggcuggacugcagcugugguggcaagugaccagaugucacugag

SEQ ID NO: 6159 - RNA, 112 nt, Homo Sapiens
cucagccucucccugauguaaucuggguuccuuguguggcaacaguaaugggaagaaaggaccugaaauauuaguugauuccaagggacccucuaagguuagagaggcagag

SEQ ID NO: 6160 - RNA, 121 nt, Homo Sapiens
cucaggaggcugaggcaggaggaucacuugagccugggaggucuaggcugcagugagccgggacgaugccacugcacuccagccugggcaacagagugagacccugucccagcacucuggg

SEQ ID NO: 6161 - RNA, 96 nt, Homo Sapiens
cucaggggcuucgccacugauuguccaaacgcaauucuuguacgagucugcggccaaccgagaauuguggcuggacaucuguggcugagcuccggg

SEQ ID NO: 6162 - RNA, 78 nt, Homo Sapiens
cucagguccuuuagugcuucucagucaacagacagggagggagcuuccccugugacugaggugcgcauaaagacugag

SEQ ID NO: 6163 - RNA, 106 nt, Homo Sapiens
cucauggucuccaaaggucucuacccagacauuucaacuuuguuguucuuuggcuacaaagaacaggagaaauggaggacuucugugggaguguggagacagugag

SEQ ID NO: 6164 - RNA, 97 nt, Homo Sapiens
cucccagcgucacggaaugcuguccugaucccuagcauuuacucacaugcugugcuuagugcuugaccaugugguggcagauucugugauguguaag

SEQ ID NO: 6165 - RNA, 69 nt, Homo Sapiens
cucccaggcaauauuccaggauaggcugccaguuggacuaaggaagccacuccugcggaacccugggag

SEQ ID NO: 6166 - RNA, 107 nt, Homo Sapiens
cucccccgagaaugucagccccuugaagcugcggucugucuaugcuggucguacccucagagccuaagaugacacagagcucaggaaaugaacacccucggaggggg

SEQ ID NO: 6167 - RNA, 99 nt, Homo Sapiens
cuccuguaguccuagagcguuucucuugaacccuaauuuuuaggucucaaagagugggcuucagagauaaagagguuuaggcagggacagggcgaggag

SEQ ID NO: 6168 - RNA, 99 nt, Homo Sapiens; identical to SEQ ID NO: 6167

SEQ ID NO: 6169 - RNA, 94 nt, Homo Sapiens
cuccuuagguuuuaucaauccuggugcccuuccauuguaucacauccuuggaucacagugauggguucaggaauagacacaugacccaagggag

SEQ ID NO: 6170 - RNA, 82 nt, Homo Sapiens
cucgugcugcgacaguuccauuccuaaugcagacuuacaaaaacuagguguaaggcuggcauuagggugaggccaggaugag

SEQ ID NO: 6171 - RNA, 116 nt, Homo Sapiens
cucguggcugcugcugcuccugcucucccucucccuccuccaggccacggauuucaugucccugugacugguggggcccauggaggagacaggaagccucaaguuccagugcagag

SEQ ID NO: 6172 - RNA, 103 nt, Homo Sapiens
cucucaccccucuagccuuaaauccagaaucuagacugaauauggacugaaugggucagauuuggggaaauguguuucuggggacagcugagggaccagagag

SEQ ID NO: 6173 - RNA, 116 nt, Homo Sapiens
cucucaucauagauuaaucacuuaguugcaagggaccaguaaauuaacagaauggugaacauuuuccuuuucuuggugcuuuugcuggaugacuagugguuucugcuggaacagag

SEQ ID NO: 6174 - RNA, 81 nt, Homo Sapiens
cucucaugcaggcaugugugagcagcugcaggugugugagcaaaugugcaucacuggggaacaggugucuguggaugaggg

SEQ ID NO: 6175 - RNA, 111 nt, Homo Sapiens
cucucuuuggcuacagacuuaccucaggcuggcuggagaguaaaucaggucuaaaagagucuccuucauaacaggcugaggauacucccagcaaucugaagccggagagag

SEQ ID NO: 6176 - RNA, 83 nt, Homo Sapiens
cucuggcacuuccaaucuccuaccugugauagacgucuaagugaaaguacuagcuuaguuguuugggauugguagugacagag

SEQ ID NO: 6177 - RNA, 114 nt, Homo Sapiens
cucuguaguuaugugcggucuuacacuauuuuacauggucacuaucagcuuaguuguuugucacuuguuggugacugcuguaagguagauuugagauguccagggacugcagag

SEQ ID NO: 6178 - RNA, 100 nt, Homo Sapiens
cucugucacccaggcuggagugagugugaucuuggcucacggcaaccuuugccuccuggguucaagcaauucuccugcccuagccucccgaguagcagag

SEQ ID NO: 6179 - RNA, 131 nt, Homo Sapiens
cucugugaugcuuggggaccggcuccucggucacaccccaguccugcucugaagguugccguuuuccaaacagaaggaugguagcuagaggggagauagcaagauucuggagucuggaaagccuucacuug

SEQ ID NO: 6180 - RNA, 72 nt, Homo Sapiens
cucuuaaacccgggaggcggagguugcagugagccgagauugcgucacugcacuccagccugggcaacagag

SEQ ID NO: 6181 - RNA, 89 nt, Homo Sapiens
cucuuaaaccuuuagaaaugcuacagcaucuagcuucucuagaucaauaaucacagaggcuuaagugcugaccucauaaagauaaagag

SEQ ID NO: 6182 - RNA, 73 nt, Homo Sapiens
cucuugaacccaggaaguggagguugcagugagcugagauagcaacacugcacuccagccugggcaacaagag

SEQ ID NO: 6183 - RNA, 73 nt, Homo Sapiens
cucuugaacccaggagguggagguuggggugagcugagaucacuccauugcacuccagucugggcaacgagag

SEQ ID NO: 6184 - RNA, 85 nt, Homo Sapiens
cucuugaccagagggucucaaaugagggacauuuuaccugccaggggacauuuccaauguuuggggacacuuuugguuaucagag

SEQ ID NO: 6185 - RNA, 82 nt, Homo Sapiens
cucuugaccagagguucucaaaugagggacauuuuaccugccggggacauuuccaauguuuggggacacuuuugguuaucag

SEQ ID NO: 6186 - RNA, 82 nt, Homo Sapiens; identical to SEQ ID NO: 6185

SEQ ID NO: 6187 - RNA, 82 nt, Homo Sapiens; identical to SEQ ID NO: 6185

SEQ ID NO: 6188 - RNA, 97 nt, Homo Sapiens
cucuugcccaggcuggaguucagugguaugaucacaacucuccuaagccucaaacaccugggaucaagugauccucuggcuucagccucccaaguag

SEQ ID NO: 6189 - RNA, 78 nt, Homo Sapiens
cucuuugaggucuguuguucagaaaaauuucuuggaaaauaugauuguucauggacaacggaccucaucacccaagag

SEQ ID NO: 6190 - RNA, 94 nt, Homo Sapiens
cucuuuugcaaaacaaaagaugucuucuuuucccuuagcccuugguuuuguuuggcagaugguguaggugaagagaacauuaguuguggaagag

SEQ ID NO: 6191 - RNA, 102 nt, Homo Sapiens
cugaaagucuaucugcugccacgccugggcacauacugcaucauuuacaaaacuguagagcaccuguugugugugcaguugugauuucuuauagauuuuuag

SEQ ID NO: 6192 - RNA, 116 nt, Homo Sapiens
cugaaggguggagagggccucucaugcaggcaugugugagcagcugcaggugugugagcaaaugugcaucacuggggaacaggugucuguggaugagggaggaagugagggugagg

SEQ ID NO: 6193 - RNA, 92 nt, Homo Sapiens
cugaaucaugcaguguauacaggaugucagugaagaggucuggcaggaaugccucacucucuuccuacugacugguacauguuaugaugcag

SEQ ID NO: 6194 - RNA, 72 nt, Homo Sapiens
cugaaugaccugcagucagggcccagaguugggacucuauacuacccugggcucuggucuguagguuuguag

SEQ ID NO: 6195 - RNA, 85 nt, Homo Sapiens
cugacaugugcauuauccaugucauuuuaaacaaagugaccuauggaaggguacgcugugcugugacaugguaaugggcuguugg

SEQ ID NO: 6196 - RNA, 78 nt, Homo Sapiens
cugagaggcagaggcuucagugagccgaggccacaccacugcacuccggccuuggugacagagacucugccucgaaag

SEQ ID NO: 6197 - RNA, 128 nt, Homo Sapiens
cugagaggugagauuccacaucccaaguugcacagcuggggagagacagugucaggacaguaucgccugugcugaggucuagcuccccagcuagacugaagcuuuaugaggauuuuauucauuucaag

SEQ ID NO: 6198 - RNA, 103 nt, Homo Sapiens
cugagcagggagaaucucgggaucccaggaggucaaggcugcagugagccacaauuuugccacugcacuccagccugggcaacagagcaagacccugucucag

SEQ ID NO: 6199 - RNA, 100 nt, Homo Sapiens
cugagcuuagaucuuauguggccuuucuggucuguguaucccaggacuguucaucuccuaugugaugcugaagaccaagagagugaccaagaaggcucag

SEQ ID NO: 6200 - RNA, 107 nt, Homo Sapiens
cugagcuuagcuaucuuugugguucaauucaccggagucucaaaaccuggcagguguuaucaucuuccugaggcaccgagagucgggacugccagaggccugcacag

SEQ ID NO: 6201 - RNA, 96 nt, Homo Sapiens
cugaggcaccuccacuggccccuuugugaggcacgcuugaccuggguuucauggaaagaaugugcccucaccaaagggugcuaaacaaggccccag

SEQ ID NO: 6202 - RNA, 101 nt, Homo Sapiens
cugaggcagagaaucucuugaaccugggagguggagguugcagugagccgagauuguccacugcacuccagccugggcaacagaguaagacucugucucag

SEQ ID NO: 6203 - RNA, 105 nt, Homo Sapiens
cugaggcaggagaaauugcuugaacccaggagguagagguugcagugagucaagaucaugccauugcacuccaaccugggcgacaagagcaaaacucugucucag

SEQ ID NO: 6204 - RNA, 104 nt, Homo Sapiens
cugaggcaggagaaucacuugaaccugggaaauggagguugcagugagccaagauugagccacugcacuccagccugggcaacaagagugaaacucugucucag

SEQ ID NO: 6205 - RNA, 103 nt, Homo Sapiens
cugaggcaggagaauggcaugaacccaggagguggagcuugcagugagccgagaucacgccacugcacuccagccugggcaacacagcgagacuccgucucag

SEQ ID NO: 6206 - RNA, 103 nt, Homo Sapiens
cugaggcaggagaauugcuuguacccgggaggugaagguugcagugagccgagauggugccacugcacuccagccugggcaacagagcaaggcccuguuucag

SEQ ID NO: 6207 - RNA, 101 nt, Homo Sapiens
cugaguuuccauagggaacuauuggguuuaaagucaccguuggaacuacacugugugaucuuauaaacuuauguucccuggcuaucauauucuuggcucag

SEQ ID NO: 6208 - RNA, 91 nt, Homo Sapiens
cugcaaugcuguuuacuuauaggaugaaacuguaucagacuuuguaguggcugugcauguugauauccuggccaguaggcagugcgugcag

SEQ ID NO: 6209 - RNA, 117 nt, Homo Sapiens
cugcagcccaagcaaaauggaaauacaagcaaucauguaguucacuguguccaucagacaggaacaaaucagaugaccaggaauugagagacugaacauuuccucagguggcuggag

SEQ ID NO: 6210 - RNA, 98 nt, Homo Sapiens
cugcagcuccaauaaaauugccgagaugauguuuggguuugugcuggacauuccugagaggagccagaggugagucuugauuuuguuggggagagcag

SEQ ID NO: 6211 - RNA, 77 nt, Homo Sapiens
cugcagggcugcugccucaacauuuuagguucugauagcuguauucucaguccuggagugacagguguagccugcag

SEQ ID NO: 6212 - RNA, 78 nt, Homo Sapiens
cugcaguggugauguguugucacuucaggacaccccacuaccugaauugcagcaguguugcgaaucaucacucugcag

SEQ ID NO: 6213 - RNA, 91 nt, Homo Sapiens
cugcaucaccugugagaggaaagaaccuuguuuuuauagcagagaaauauaagcacagggagguucugucacuugccagugaugaucccag

SEQ ID NO: 6214 - RNA, 103 nt, Homo Sapiens
cugccagccgucugucucuaguguuuuuccaaaugacauccagggcucuggccguggagucccugaugugaucgcuaaaggaccuccggagaggggcucgcag

SEQ ID NO: 6215 - RNA, 100 nt, Homo Sapiens
cugcccccgcccucuggacccgagugacucaggccuuuguuuguccuuccugguagaggcggguucccucccucggcaagaugccggagugcugggaugg

SEQ ID NO: 6216 - RNA, 96 nt, Homo Sapiens
cugccuaaugaugguguauggaagcuguagcauuucuggcaccugccaacuugucagagcugccuuucccuuccuggcacuuugucuauguggcag

SEQ ID NO: 6217 - RNA, 81 nt, Homo Sapiens
cugccuagcuuagugagggaauccauucuggcuucagaccagucuggguuugaaaccuacacaucccacuaacuuaggcag

SEQ ID NO: 6218 - RNA, 99 nt, Homo Sapiens
cugccuauauuacauucauuuugaugguuuguaucucaaaggaguacagugaacgaaacuuguuuaaagauacaccggaaagaaaaagagaagaggcag

SEQ ID NO: 6219 - RNA, 102 nt, Homo Sapiens
cugccuccccacucaagcucuguaaggacgcaaagagggcaaggccacgaaggacucagccuggcccaucgugucccugcucugccccagugccagagccag

SEQ ID NO: 6220 - RNA, 72 nt, Homo Sapiens
cugccucucugcaggccgugugcuuugcucgguugaucuugcagagccuaagacacaggcccagagaggcag

SEQ ID NO: 6221 - RNA, 71 nt, Homo Sapiens
cugcuugaacccaggaggcagagauugcagugagucaagauggcacuacugcacuccagccugggcaacag

SEQ ID NO: 6222 - RNA, 68 nt, Homo Sapiens
cuggaacccaggaggaggagguuguggugagccaagaucgugccacugcacuccagccugggcaacag

SEQ ID NO: 6223 - RNA, 109 nt, Homo Sapiens
cuggaggauuuggggugccccucucggcagggaacaggaaguaggaaucccagaagggucugggggaacccuaacccugagcucaguccaguucaccccucaccuccag

SEQ ID NO: 6224 - RNA, 96 nt, Homo Sapiens
cuggaggcagcaaagauuaucuuauuuauuuuauuuuguuuucugcuauauuuagaguggcaaaaaaauagagcagaggguuucugcugucuccag

SEQ ID NO: 6225 - RNA, 73 nt, Homo Sapiens
cuggaggcucaggagucuuuuaucugcaauaggacaaugauucuccuagcagaucugugacuccuaugcucag

SEQ ID NO: 6226 - RNA, 106 nt, Homo Sapiens
cuggauuccccaaagcucacaguuuggcacugaaucauauacaaucucguaguuuggauggcugugugugacugcagacugcuagacagcagggcccacaucacag

SEQ ID NO: 6227 - RNA, 111 nt, Homo Sapiens
cuggcauacaagagcccggaacuucugccgauuugucacugcaaucaacaauacuccccggaacaucggcaaggauggcaaguuucagaugcuggugugcuugggagccag

SEQ ID NO: 6228 - RNA, 80 nt, Homo Sapiens
cuggcugcuccucuccauguacccauuccccuuggggugcaagccacaccacccuucacuugggggaugauagcagccag

SEQ ID NO: 6229 - RNA, 82 nt, Homo Sapiens
cugggaggcagagguugcagugaucaggaauugugccacugcacuccaaccugagugacagagcaacacucugucuuaaaag

SEQ ID NO: 6230 - RNA, 84 nt, Homo Sapiens
cugggaugggauggagcaagaggugaagaucuuggagucuggaaucagaccaccuggauuuucauccuaguuccccgaucuggg

SEQ ID NO: 6231 - RNA, 105 nt, Homo Sapiens
cugggauuacaggcaccugcugccaagucuggcuaauuuuuguauuuuuaauagagacgggguuucgcuauguuggccaggcuggucucgaacuccugaucucag

SEQ ID NO: 6232 - RNA, 85 nt, Homo Sapiens
cugggauuacaugugugagccaccgcgccuggccucaaauuguuuuugaaguaguuagguuguagcucauaagacugucuuucag

SEQ ID NO: 6233 - RNA, 93 nt, Homo Sapiens
cugggggcugagaccacccuugccugcccccuucuuucugccuuaagaauguccuuuuaggcugggcaugguggcucacgccuguaaccccag

SEQ ID NO: 6234 - RNA, 74 nt, Homo Sapiens
cuggguucccaaauucuccuugcuguucugcaucauugucuagauggauuaguaaagaagaaugaaaacuccag

SEQ ID NO: 6235 - RNA, 108 nt, Homo Sapiens
cuggucuggcagcacuaagaggcaggcauucuggguaucagacauaaauccccucccaggaacuuuuguguccugacccagaggacuggcucuugagaaugagaacag

SEQ ID NO: 6236 - RNA, 109 nt, Homo Sapiens
cuguaauuccagcacuuugggaugccgaguugagaggaucacuugaagccgggaauuugaggcugcagugagcuaugaucaugccgguguacuucagucugggcaacag

SEQ ID NO: 6237 - RNA, 84 nt, Homo Sapiens
cuguacaaagcagccuuggaccaggagggaaaaccccaaggcucugcagccucccugcuccccuccguuuaaggcuguggucag

SEQ ID NO: 6238 - RNA, 98 nt, Homo Sapiens
cuguauuucaugcaauacaaaggaagauggcuguuugggguugccgugucucuuagcaauuaaggagauggcuacagccaagcagugugaagugacag

SEQ ID NO: 6239 - RNA, 96 nt, Homo Sapiens
cuguccuguagauacaugggggaugaucauaagugagcuuuuauaagcgcagaguauuaccuauaucaccgugaaaguguaucgcauacaggacag

SEQ ID NO: 6240 - RNA, 102 nt, Homo Sapiens
cugucucugggcccugucugaggcuucuuaagauguuguuacaauaaucuacuauguggagugucuggaggugucucuuacuucucuggcauuaagagacag

SEQ ID NO: 6241 - RNA, 78 nt, Homo Sapiens
cugucugggcaacaugcugaaaccccagcucuguaaacaauacaaaaauuagcugggcguggcggucugugccuacag

SEQ ID NO: 6242 - RNA, 109 nt, Homo Sapiens
cugugacuauuucgcugaaucuuugcaacucugagaggucaguacuuuuauuuuacccauuuuguaggugagaaaacugaggcucagaaaggguaacacagugacacag

SEQ ID NO: 6243 - RNA, 112 nt, Homo Sapiens
cugugaugguuguguucuauuauaaaguggcaccauuggagucuaagggugcuuguuugcccuuacacuaaauggucccaaguguuuaugugguucugacacugccguccag

SEQ ID NO: 6244 - RNA, 83 nt, Homo Sapiens
cugugcucuugauaacagaguguuugagggacaacuuucacauuugaguuuuuccaaaauuaaagguuguagaagagucacag

SEQ ID NO: 6245 - RNA, 85 nt, Homo Sapiens
cugugguugaaggaauggauggaagugugugagcuagauugcacagauagcaagcagaacauuucuggugaacuuggacacacag

SEQ ID NO: 6246 - RNA, 108 nt, Homo Sapiens
cuguugcccaggcuggagugcaguggcaccaucucagcucacuggagcgucugccuccagguucaagugauucuccugccucagcaucccaaguagcugggacuacag

SEQ ID NO: 6247 - RNA, 82 nt, Homo Sapiens
cuguuguuaaaaccugcuuccccacugcucagccugccaucagccauccagcugcagagcaguggagaguaggucucaccag

SEQ ID NO: 6248 - RNA, 114 nt, Homo Sapiens
cuguuuccuauaggugcugucagaucagguuccugauuggaguucucuuaucugcucugguuuggagggcugccccauucgggaaucuguuuuguuuugcucaaauacacucag

SEQ ID NO: 6249 - RNA, 85 nt, Homo Sapiens
cuuaaguuugcuugcaguguauguguguaugucugugugugcaugcacgcacaugugcacaugcagcagggagaguggaauuaag

SEQ ID NO: 6250 - RNA, 87 nt, Homo Sapiens
cuuaccccaguauccuauuaucucauaccuaaggcagugaugguuucucagaccucuuagauugagaagauguggcauggguguaag

SEQ ID NO: 6251 - RNA, 110 nt, Homo Sapiens
cuuacccuguauuucaugcaauacaaaggaagauggcuguuugggguugccgugucucuuagcaauuaaggagauggcuacagccaagcagugugaagugacagcaccag

SEQ ID NO: 6252 - RNA, 75 nt, Homo Sapiens
cuucaccaaguugucauuugagcacaguuugaggaguguaagacagucaugcggacuugagggguacaagggaag

SEQ ID NO: 6253 - RNA, 106 nt, Homo Sapiens
cuucaccugaacucacuggggcuucuccagggauauuaaccuggacuuuaagagucagagugagucccugggacuaguucagcccauccaggauucagacgggaag

SEQ ID NO: 6254 - RNA, 69 nt, Homo Sapiens
cuuccaugggcaggggccaugacagggagauaggccacaccuuucccagguggaaccugcagauggagg

SEQ ID NO: 6255 - RNA, 130 nt, Homo Sapiens
cuucucacuuucccuucacacacagucguguaguuuugcgcuugcuugauuaaucucuuggccucagucgguuuucuaccauauggaguugguucauucucucgaauggcuguguaguccaguguguggg

SEQ ID NO: 6256 - RNA, 92 nt, Homo Sapiens
cuucuugcaggcaguguuguuccugauugccccagucuaguuuaucgcaagggaauuucuuugcggggcagugagcucccuuuuggcagaag

SEQ ID NO: 6257 - RNA, 70 nt, Homo Sapiens
cuugaacccaggaagcggagguugcagugagcugagauugccucacugcacuccagccugggcaacagag

SEQ ID NO: 6258 - RNA, 69 nt, Homo Sapiens
cuugaacccaggagguggagauugcagugagccgagaccacgccacugcacuccagccugggcaacaag

SEQ ID NO: 6259 - RNA, 69 nt, Homo Sapiens
cuugaacccgggaagcagagguugcagugagccgacaucgugccacugcacuccagccugggcaacaag

SEQ ID NO: 6260 - RNA, 70 nt, Homo Sapiens
cuugaacccgggaaggcggagguugcagugagccgagaucgugccacugcacuccagccugggcaacaag

SEQ ID NO: 6261 - RNA, 69 nt, Homo Sapiens
cuugaacccgggagguggaggcugcagugaacccagacccugccacugcacuccagccugggcaacaag

SEQ ID NO: 6262 - RNA, 69 nt, Homo Sapiens
cuugaaccugaaaggcagaggcugcggugagcugagauugcgccauugcacuccagccugggcaacaag

SEQ ID NO: 6263 - RNA, 66 nt, Homo Sapiens
cuugaaccugggagguggaggcuacagugagcugagaucaugccacugcacuccagccugggcaag

SEQ ID NO: 6264 - RNA, 93 nt, Homo Sapiens
cuugacaccuccuguccaguacugucuugaugccugccccauaaagugacucugcgaugggcaaguguuaugaucagauuggaggguguaaag

SEQ ID NO: 6265 - RNA, 119 nt, Homo Sapiens
cuugagaaaagacaacuaguauuugaggaaggugugagaaaugagccuaaagagguagaugagacucaaaggaggcugauaaagauaccacagcuacaaguuuuuguuauauucugaag

SEQ ID NO: 6266 - RNA, 74 nt, Homo Sapiens
cuugaucugucacccaggcugcaguguaguggcaugaucucggcucacugcaacccccgccuccuggguucaag

SEQ ID NO: 6267 - RNA, 71 nt, Homo Sapiens
cuugccaugcagcccuuuuuauggagcaagucacaauacagcagcuugcuucauuagggcaagcaagcaag

SEQ ID NO: 6268 - RNA, 78 nt, Homo Sapiens
cuugcuugaacccaggaggcggagggugcagugagucgacaucaugccacugcacuccagccugggcaacagagcaag

SEQ ID NO: 6269 - RNA, 88 nt, Homo Sapiens
cuuggcuggguuuuuccacgugagauggugucauauugcuggguccagcacccaguuauuguggcccaauuuccuauacccugccuag

SEQ ID NO: 6270 - RNA, 90 nt, Homo Sapiens
cuuuaguuuuaaggaagugucucuuggcuggccccuagauagcuuuaggaugggagcuagucaccagaaacaccaauccuugauuagaag

SEQ ID NO: 6271 - RNA, 75 nt, Homo Sapiens
cuuucucucgugaauggagcuguuuucuucagagccuuugcucugaaacaucacgcuccccuguauggggagaag

SEQ ID NO: 6272 - RNA, 130 nt, Homo Sapiens
cuuucugugccacucaggaagcaaugggcaugauucagcagaggagaggagaguuuagaacugguuaugcuuccuucuccaacccucccugcaaaaacacuggccagcuccugacaucacaguaagacag

SEQ ID NO: 6273 - RNA, 106 nt, Homo Sapiens
cuuugagaugacugguauugaauggagcagucuuugaaaggcaccaacccuuccuaacugaugguggucucuugaaagaggcucuuccaaauuugucuucugaaag

SEQ ID NO: 6274 - RNA, 73 nt, Homo Sapiens
cuuugugaguggcuuugaaacuguaaugagcgcaguuuacugagucauuacuagucucgacccauucguagag

SEQ ID NO: 6275 - RNA, 71 nt, Homo Sapiens
cuuuuccaccaucuaagagaaaggaaguucagagccuuagcuucaacaccacaauuucuuaacuggaaaag

SEQ ID NO: 6276 - RNA, 131 nt, Homo Sapiens
cuuuugagcugcuucuuauaaugugucucuuguguuaaggugcaucuagugcaguuagugaagcagcuuagaaucuacugcccuaaaugccccuucuggcacaggcugccuaauauacagcauuuuaaaag

SEQ ID NO: 6277 - RNA, 112 nt, Homo Sapiens
cuuuuuccuccagugaacggugacuugacagagguacauaggaggcuacuuguucucuuguuggcugcuuguauuugcuuucuggaagguuauuguuuucaaggaucuuaag

SEQ ID NO: 6278 - RNA, 100 nt, Homo Sapiens
cuuuuucucugcccuucgucauuaugcagccugugaacagcgucugggaaagugguggucauugguugcauaauuugaucugaggcuuauggaggaaagg

SEQ ID NO: 6279 - RNA, 72 nt, Homo Sapiens
gaaaagggcugaucaguauuuucugauccuaguucagugcuagucagggagacugucaguaaagaccuuuuu

SEQ ID NO: 6280 - RNA, 60 nt, Homo Sapiens
gaaaagguggugucauguuuuggggagaaucuuacuucucaaauggaaauugcacuuuuu

SEQ ID NO: 6281 - RNA, 100 nt, Homo Sapiens
gaaagggaguccacggaagcgugagaauggaggaagaacagugcuuugagugacugcugcagggucuuccuauuauuuuuaguucugaggauucucguuc

SEQ ID NO: 6282 - RNA, 87 nt, Homo Sapiens
gaaagucuguuguuguaaacauccccgacuggaagcuguaagacacagcuaagcuuucagucagauguuugcugcuaccggcuauuc

SEQ ID NO: 6283 - RNA, 82 nt, Homo Sapiens
gaaauccugggguugcaagacugccagccugugugaucaauccugcgguuaggaagguggaguuuugcuuucccaucuuuuc

SEQ ID NO: 6284 - RNA, 99 nt, Homo Sapiens
gaaauggagucuugcuuugucaccgaggcuggagugcaguggcaugaucucugcucacugcaagcuccaccucccggguucacgccauucuccugccuc

SEQ ID NO: 6285 - RNA, 116 nt, Homo Sapiens
gaaauguggagaauuaaaaaggguagugaggcuggcauuuauagaaucuggcuuucuuguauuggguggaaagcuagaugaaaccaguuucucucagccuuuucucuccucagguc

SEQ ID NO: 6286 - RNA, 96 nt, Homo Sapiens
gaacacaaagagguguagaaucuggguugguccuucaaggcagcucauugcagcuacuggccuccagugaaacaggucucuuugagcuauuuguuc

SEQ ID NO: 6287 - RNA, 107 nt, Homo Sapiens
gaacauccaggucuggggcaugaaccuggcauacaauguagauuucuguguucguuaggcaacagcuacauugucugcuggguuucaggcuaccuggaaacauguuc

SEQ ID NO: 6288 - RNA, 86 nt, Homo Sapiens
gaaccuuugauguuacucuaucgucuggaucucuuuugccugugagggaggcagagagguauuuaggcaugaggcagcagagguuu

SEQ ID NO: 6289 - RNA, 106 nt, Homo Sapiens
gaacugggucauuuaucaaacucuguguuuauguggccuuuagaauauuaucccucaguaaguuagaggcacagauuaauggaguuugaagguugucacuugguuu

SEQ ID NO: 6290 - RNA, 96 nt, Homo Sapiens
gaagaacugggugaucuugugaaaucuguggacccuacauuggcacuuaguguguaccuaagggcuaacgucccaaauaaagucauucagugcuuu

SEQ ID NO: 6291 - RNA, 76 nt, Homo Sapiens
gaagaagaagaauggguuuggugagaggguuccaauauuaacaacccaacuucaagcucauuccucuaaccucuuc

SEQ ID NO: 6292 - RNA, 131 nt, Homo Sapiens
gaagaaguagauugggcugcaaucacacaaugggugcaucaccagugcggacaccuaggcguacagggaaccauggcuuggggaguguaaagaaggauguuaccccaggaugcaguucagacaauuuuauc

SEQ ID NO: 6293 - RNA, 90 nt, Homo Sapiens
gaagaaucgcuugaaucccaaagguggagguugcagugagccgagaucgcgccacugcacuccagccuggcgacagagcaagacuccguc

SEQ ID NO: 6294 - RNA, 93 nt, Homo Sapiens
gaagaaucucuuaaacccgggaggcggagguugcagugagccgagauugcgucacugcacuccagccugggcaacagagcgagacuccguuuc

SEQ ID NO: 6295 - RNA, 130 nt, Homo Sapiens
gaagaggccuuuacuccuguuuucuuccauucucaccccucuguuucugccagaauugugacagcagggcagaaaaugggcuuuucgugcagaguugacaagauacaggguagugaagacaagaaucuuc

SEQ ID NO: 6296 - RNA, 114 nt, Homo Sapiens
gaagcuaccugagguuuagaauuccuucagcccuagcugcuuuuauucugcuuuuuauuuaaacaaaaagagggggaggaucugaaggaaacuaguuuucuguacaaaggcuuu

SEQ ID NO: 6297 - RNA, 77 nt, Homo Sapiens
gaaggguaccugcuggagaccugugugguuugugggguggguuucuuauaucacugaaucuaaagugggugccuuuc

SEQ ID NO: 6298 - RNA, 72 nt, Homo Sapiens
gaaguuccaggcuguagugcacuaugaugaucguacguaugaacagccauugcacuccagccugggcaauuc

SEQ ID NO: 6299 - RNA, 117 nt, Homo Sapiens
gaauaaauaagcugcucuaauugccaagaauucacaugugguuguaugcagcauuacugggaaauugaaguguaucugcaugugauucugcugugauggacacuuguaaguuuguuc

SEQ ID NO: 6300 - RNA, 113 nt, Homo Sapiens
gaauaaauaagcugcucuaauugccaagaauucacaugugguuguaugcagcuuuacugggagacugaaguguaucugcaugugauucugcugugauggacacuuguaaguuu

SEQ ID NO: 6301 - RNA, 113 nt, Homo Sapiens; identical to SEQ ID NO: 6300

SEQ ID NO: 6302 - RNA, 111 nt, Homo Sapiens
gaauagcgaguugcccaagcucacaaaguaugugauggagcuagagauucaaacccaggccucucuggcuccuucuuuggggugggcuugcucugggaaaauaugcuauuu

SEQ ID NO: 6303 - RNA, 84 nt, Homo Sapiens
gaaucacuuaagcccaggaauuugaggcugcagugagcaaugacugugccacuguacuucagccuggguaacagaggggacuuc

SEQ ID NO: 6304 - RNA, 84 nt, Homo Sapiens
gaaucgcuugaaccugggaggaagagguugcagugagccgagauggcaccacugcacuccagccugggcaacagagcaagauuc

SEQ ID NO: 6305 - RNA, 108 nt, Homo Sapiens
gaaucugguugguuccuuaaagaucacuugacauggacaggguuuggaaaacuauuugaucauuacggagacugucaccgucaagagguguuuauuaucauuagguuu

SEQ ID NO: 6306 - RNA, 101 nt, Homo Sapiens
gaaugauuugaagggggcagucagagaaguaggaauaucaggagugguggucugauuacucugagaugugucuugauucuauuuuguuuucuuugaaauuc

SEQ ID NO: 6307 - RNA, 103 nt, Homo Sapiens
gaauuccuaaguauguggucuguauugugcuuguacugaccauguauauaugcuaugguuauuuagugcuagcuaagaacauaccauuuccccaguagcaguc

SEQ ID NO: 6308 - RNA, 90 nt, Homo Sapiens
gacagcagaacuuuucuauccaaaugaaugccgucccauggaaaguggcuguccugggaggcuacacguuucuccaauggugaugcuguu

SEQ ID NO: 6309 - RNA, 131 nt, Homo Sapiens
gacagcuggaauguucugaagaacugggugaucuugugaaaucuguggacccuacauuggcacuuaguguguaccuaagggcuaacgucccaaauaaagucauucagugcuuugcagaaacaggucaaguc

SEQ ID NO: 6310 - RNA, 82 nt, Homo Sapiens
gacaggauuccaguacaggucucucauuuccuucaugauuaggaauacuacuuugaaaugagagaccuguacuguaucuguu

SEQ ID NO: 6311 - RNA, 84 nt, Homo Sapiens
gacaugucaaggcaggagccaucugaucgaccuuagacuuggcaagcugguggcuaaguccagugcucacugccgacaucuguc

SEQ ID NO: 6312 - RNA, 64 nt, Homo Sapiens
gaccagccauccugguuuacaugggacgcaggaacugccguuuuaaagcugggcugaguugguc

SEQ ID NO: 6313 - RNA, 97 nt, Homo Sapiens
gaccaugaagccagagucuccaggacuccucacucaaccucggccauggacgcagguugggugugaggggggucccagccuuucggucuucuauuuc

SEQ ID NO: 6314 - RNA, 97 nt, Homo Sapiens; identical to SEQ ID NO: 6313

SEQ ID NO: 6315 - RNA, 74 nt, Homo Sapiens
gaccucaggaaagcuggguugagcugggcugagacaauuaaugucugucagcccaaacccggcacucugaccuc

SEQ ID NO: 6316 - RNA, 79 nt, Homo Sapiens
gagaacugggauggaggagaauuagaggauggugugguguuucccaagacauccccugaucuugcuaucccagcaucuc

SEQ ID NO: 6317 - RNA, 75 nt, Homo Sapiens
gagaacuguagugcaagguuuugccaacuuuuugaccagaauccucggugaguaauaaauuuugcacugcagcuc

SEQ ID NO: 6318 - RNA, 114 nt, Homo Sapiens
gagaagauaaaugcguuuucagggaugucaucuugggccugcuuuucucugaucguguagcgaugggcucauuuugcagugauuuauaccugauggccgugaaccuaucuucuc

SEQ ID NO: 6319 - RNA, 86 nt, Homo Sapiens
gagaaucacuugaacccaggaggcagagguugcagugagcugagauuaugccauugcacuccagccugggugacagagugaaacuc

SEQ ID NO: 6320 - RNA, 86 nt, Homo Sapiens
gagaaucacuugaacccaggagguggagguugcagugagccaagaucgugccauugcacuccagccuggguaacagagugggacuc

SEQ ID NO: 6321 - RNA, 86 nt, Homo Sapiens
gagaaucgcuggaacccaggaggaggagguuguggugagccaagaucgugccacugcacuccagccugggcaacagaacaagacuc

SEQ ID NO: 6322 - RNA, 92 nt, Homo Sapiens
gagaaucgcuggaacccaggaggaggagguuguggugagccaagaucgugccacugcacuccagccugggcaacagaacaagacuccgucuc

SEQ ID NO: 6323 - RNA, 92 nt, Homo Sapiens
gagaaucgcuugaacccaggagacugagguugcagugagcugagaucaugcaacugcacuccagccugggcaacacagcaagacuucaucuc

SEQ ID NO: 6324 - RNA, 91 nt, Homo Sapiens
gagaaucgcuugaacccaggagguggaggcugcaguaagccgagauugugccacugcacuccagccugggcaacaagagcaaaacuaucuc

SEQ ID NO: 6325 - RNA, 87 nt, Homo Sapiens
gagaaucgcuugaaccccggaggcagagauugcagugagccgagaucaugccacugcacuccagccugggcaacaagagcgaaacuc

SEQ ID NO: 6326 - RNA, 87 nt, Homo Sapiens
gagaaucucuugaacccaggaggcagaggugguggugagucgagauagcaccauugcacuccagccugggcaacaagagcgaaacuc

SEQ ID NO: 6327 - RNA, 86 nt, Homo Sapiens
gagaauugcuuaaacccgggagguggagguugcagugagccaagaucacgccacugcacuccagccugggcaacagagugagacuc

SEQ ID NO: 6328 - RNA, 86 nt, Homo Sapiens
gagaauugcuugaacccaggagguggagguugcagugagccgagaucacgcuacugcacuccagccugggugacagagugagacuc

SEQ ID NO: 6329 - RNA, 86 nt, Homo Sapiens
gagaauugcuugaacccaggagguggagguugcagugagcugagaccaugccauugcacuccagccugggcaacagagugagacuu

SEQ ID NO: 6330 - RNA, 86 nt, Homo Sapiens
gagaauugcuugaacccaggcaucggagguugcagugagccgagauugcaccaaugcacuccagccugggcgacagagcgagacuc

SEQ ID NO: 6331 - RNA, 86 nt, Homo Sapiens
gagaauugcuugaacccgggagguggagguuguagugagccgagaucgcgccacugcacuccagccugggcaacagagugagacuc

SEQ ID NO: 6332 - RNA, 87 nt, Homo Sapiens
gagaauugcuugaacccuggagguggagguugcagugagccgagauugcaccauugcacuccacccuaggcaacaagagcaaaacuc

SEQ ID NO: 6333 - RNA, 87 nt, Homo Sapiens
gagaauugcuugaaccugggagguggagguuguggugagccgaaauugugccauugcacuccagccugggcaacaagagcgaaacuc

SEQ ID NO: 6334 - RNA, 86 nt, Homo Sapiens
gagaauugcuugaacgccggggucggagguugcagugagccaugaucgcgccacugcacuccagccugggcaacagagcgagacuc

SEQ ID NO: 6335 - RNA, 85 nt, Homo Sapiens
gagaauugcuuuaacccgggagguggagguugcagugacugagaucgggccacugcacuccagccugggcaacagagagagacuc

SEQ ID NO: 6336 - RNA, 97 nt, Homo Sapiens
gagacagaagaaucgcuugaacucgggcggcggaaguugcagugagcugagauugcaccacugcacuccagccugggcaacagugagacucugucuc

SEQ ID NO: 6337 - RNA, 97 nt, Homo Sapiens
gagacaggaccuggcuucaggacuguggacugggcugcuggccugcuugcuuccucccuuccccauuccuagcagggccugaggcccuccucuucuc

SEQ ID NO: 6338 - RNA, 99 nt, Homo Sapiens
gagacaggagaaucacuugaauccgggaggcaaagguugcagugugucaagaucacaccacugcacuccagccugggcaacagagugagacuucaucuc

SEQ ID NO: 6339 - RNA, 99 nt, Homo Sapiens
gagacaggagaaucacuugaaucugagagguggaaguugcagugagccgagauugugccacugcacuccagccugggugacagagugaaacuccaucuc

SEQ ID NO: 6340 - RNA, 100 nt, Homo Sapiens
gagacaggagaaucgcuagaacccuagaggcagagguugcagugagcagagagagugccacugcacuccagccugggcaacaagagugaaauuccgucuc

SEQ ID NO: 6341 - RNA, 100 nt, Homo Sapiens
gagacaggagaaucgcuugaaccccagagguggagguuguggugagccgagauugcaccauugcacuccagccugggcaacaagagcgaaacuccgucuc

SEQ ID NO: 6342 - RNA, 100 nt, Homo Sapiens
gagacaggagaaucgcuugaacccgggaggcagagguugcagugagaugagaucacaccacugcacuccagccugggcaacaagagcgaaacuccaucuc

SEQ ID NO: 6343 - RNA, 99 nt, Homo Sapiens
gagacaggagaaucgcuugaacccgggagguggagguuacggugagugagaucgcgccauugcacuccagccugggcaacaagagcgaaacuccgucuc

SEQ ID NO: 6344 - RNA, 96 nt, Homo Sapiens
gagacaggagaaucgcuugaaccugggaggcagagguugcgguuagccaagauugugccacugcacuccaugggugacacagagagacucugucuc

SEQ ID NO: 6345 - RNA, 99 nt, Homo Sapiens
gagacaggagaauugcaugaacccaggaggcagagguugcagugagcugagcucgugccacugcacuccagccugggcaacaaagcgagacuccgucuc

SEQ ID NO: 6346 - RNA, 99 nt, Homo Sapiens
gagacaggagaauugcuugaaccuggcaggcggagguuacagugagccaagaugguaccacugcacuccagccugggcaacauagcaacacucugucuc

SEQ ID NO: 6347 - RNA, 98 nt, Homo Sapiens
gagacaggggaaucgcuugaaucugcaagguggagguugcagugagcugagauugugccacugcacuccagccuggcaacagaaugagacucuaucuc

SEQ ID NO: 6348 - RNA, 109 nt, Homo Sapiens
gagaccucuaucuauaaaaaaugaggcaggaguuggcaagaggucaagacugcaaugagccaugauccugccacuauacuccugccugggugaugggagacccugucuc

SEQ ID NO: 6349 - RNA, 106 nt, Homo Sapiens
gagacgugagaaucguuugaaccugggagguggagguuguagugagcccaaaucaugccacaugucacugcacuccagccuaggcaacagagcaagacucugucuc

SEQ ID NO: 6350 - RNA, 103 nt, Homo Sapiens
gagacucacccguucuacuggcaacuggaguuuguucaagaaauaccugaguugguucuuuaacugucgaguucgauuguccaaguggaagggugggagucuc

SEQ ID NO: 6351 - RNA, 108 nt, Homo Sapiens
gagagaggaaaugagaggagucggcuggggcgaguguggaccgcagcccagaguuagucuuggcugcagugcaacucuuucuaaaauguuauucucacgcccuuucuu

SEQ ID NO: 6352 - RNA, 101 nt, Homo Sapiens
gagaggcauugugagggagagaggugucaggaaugaaagaaugucuuaaaauucuaagcagucuuucuucuucuucucuuuauuaacagcaauuaacucuc

SEQ ID NO: 6353 - RNA, 99 nt, Homo Sapiens
gagaugagaggauugcuugaauccaggagguggaggcuguagugagcuaugauuguggcacagcaguccagccugggugacacaaggauacccugucuu

SEQ ID NO: 6354 - RNA, 102 nt, Homo Sapiens
gagauggaguuuugcucuuguugcccaggcuguaguguaauguagugcaaucuuggcuuaguacaaccucugccuccuggguucaagccauucuccugccuc

SEQ ID NO: 6355 - RNA, 131 nt, Homo Sapiens
gagauggcaauuuaaacugcuuugaugaccagguuucauuagguaagaaggcccgauuaagcaacgguggcccaaauaaccucagugguucagacacuguuuuucaaagccagcagaagucuugccaaauu

SEQ ID NO: 6356 - RNA, 98 nt, Homo Sapiens
gagaugggagaaucacuuaagcccaggaauuugaggcugcagugagcaaugacugugccacuguacuucagccuggguaacagaggggacuucauuuc

SEQ ID NO: 6357 - RNA, 99 nt, Homo Sapiens
gagaugggagguucacuugaacccaggagguggaggcuguggugagccaacauccugccacugcacuccagccugggcaacagagccaaacucugacuc

SEQ ID NO: 6358 - RNA, 89 nt, Homo Sapiens
gagauugcuugagcccagguaguugagacugcagugaaccaugauugugccacugcacucagccugggugacaguuaagacccugucuc

SEQ ID NO: 6359 - RNA, 109 nt, Homo Sapiens
gagcaaggacaaguugugaccuucccaguccucucuccauuugcagaucagcaagcuucugucagcaaggagggguggacaaugaaacuggguucagcuugauuuguuu

SEQ ID NO: 6360 - RNA, 76 nt, Homo Sapiens
gagccauuaaucucggggucucagccucucuuaacggaccuuccaggcacugcugagaaaaccagguuaaugguuu

SEQ ID NO: 6361 - RNA, 101 nt, Homo Sapiens
gagccuuuuaaugacacaguggggccaguuggagcacugauccuggucauuacuccugcacccuggccugcagccuuccucucagugucuuauuugggcuu

SEQ ID NO: 6362 - RNA, 88 nt, Homo Sapiens
gagcucccacggcuuuucuagaaauuggcacacaaacuccaaagcguguguggaaaugcagaugaccugggagacccaaaacaaccuc

SEQ ID NO: 6363 - RNA, 99 nt, Homo Sapiens
gagcugccagcauggcuagaaugaagcagguaggagaaauuggagagacuagacuuguugagucuuccagccuccaucuuucucccaugcuggaugcuu

SEQ ID NO: 6364 - RNA, 98 nt, Homo Sapiens
gagcuggagucucgcucugucacccaggcuggagugcaguggugcgaucuuggcucacugcaaccuccaccuuuguguucaagcaauucuccuuccuc

SEQ ID NO: 6365 - RNA, 101 nt, Homo Sapiens
gagcuguccgugacguagguuuguacgucaacucagccuuauucugggaaaucauuaauccuuaacucugaugacugugcaaaaguagucacugaccacuc

SEQ ID NO: 6366 - RNA, 88 nt, Homo Sapiens
gaggaucacgugagcccaggaggugaaggcuacagugaagugagaucaugcaacuguacuucagccugggcaacagagcaagauucuc

SEQ ID NO: 6367 - RNA, 82 nt, Homo Sapiens
gaggaucccugaguggggguugaggcugcagugagccaugaucaagccacugcacuccagccugggcaacacugagacacuc

SEQ ID NO: 6368 - RNA, 86 nt, Homo Sapiens
gaggaucccugaguggggguugaggcugcagugagccaugaucaagccacugcacuccagccugggcaacacugagacacucucuc

SEQ ID NO: 6369 - RNA, 87 nt, Homo Sapiens
gaggaugguuugagcccaggaggcagaaguugcagugagcugaaaucaugccacugcacuccagccugggugauagagccaaaccuu

SEQ ID NO: 6370 - RNA, 100 nt, Homo Sapiens
gaggcaagagaaucgcuugaacccaggaggcagagguugaagugagccgagaucgugccauugcacuccagccugggcaacaagagcgaaacuccgucuc

SEQ ID NO: 6371 - RNA, 99 nt, Homo Sapiens
gaggcaagagaauugcuugagcccgggaggcgaagguugcagugagcugagauggugccacugcacuccagccugggcaacagagcaagacugugucuc

SEQ ID NO: 6372 - RNA, 82 nt, Homo Sapiens
gaggcagaacuuccagugauucauuugguuguucauuuuguugggacugagaacagccagaugacuggauccacacugccuc

SEQ ID NO: 6373 - RNA, 99 nt, Homo Sapiens
gaggcagaagaaucacuucaaccugggagguggagguugcagugagcugacauugcgccacugcacuccagccugggcaacagagggacacucugucuc

SEQ ID NO: 6374 - RNA, 99 nt, Homo Sapiens
gaggcagaagaauggccugaacccaggaggcggagcuugcagugagcugagaucacgccacugcacuccagccugggcaacagagcaagacucugucuc

SEQ ID NO: 6375 - RNA, 96 nt, Homo Sapiens
gaggcagagaauugcucgaacccgggagacagagguugcagugagccgagauugugccacugcacuccagccugggcaacagagcgagacugcguc

SEQ ID NO: 6376 - RNA, 97 nt, Homo Sapiens
gaggcaggaaaaucgcuugaacccaaggcagagguugcagucagcagauauugcaccacugcacuccagccugggcaacaaagcaagacucugccuc

SEQ ID NO: 6377 - RNA, 97 nt, Homo Sapiens; identical to SEQ ID NO: 6376

SEQ ID NO: 6378 - RNA, 97 nt, Homo Sapiens; identical to SEQ ID NO: 6376

SEQ ID NO: 6379 - RNA, 99 nt, Homo Sapiens
gaggcaggacaaucacuugaacccaggaguuugaggcugcagugagccgagaucacgccacugcacuccacccugggcaacagagcaagaucuugucuc

SEQ ID NO: 6380 - RNA, 101 nt, Homo Sapiens
gaggcaggagaaauugcuugaacccaggagguagagguugcagugagucaagaucaugccauugcacuccaaccugggcgacaagagcaaaacucugucuc

SEQ ID NO: 6381 - RNA, 100 nt, Homo Sapiens
gaggcaggagaacagcuugaacccagguggcagagguugcagugagcugagaucaugccacugcacuccagccugggcaacaagagcgagacuccgucuc

SEQ ID NO: 6382 - RNA, 98 nt, Homo Sapiens
gaggcaggagaauaacuugaacccaggagacggagguuguugugagccgagaucgcgccauugcacuccagccugggcaacgagcgaaacuccgucuc

SEQ ID NO: 6383 - RNA, 99 nt, Homo Sapiens
gaggcaggagaaucacuugaacccgggagauggagguugcagugagccgagauggcgcaacugcacuccagccugggcaacaaauggagacucugucuc

SEQ ID NO: 6384 - RNA, 99 nt, Homo Sapiens
gaggcaggagaaucacuugaacccgggaggcugaggguacagugagccgagaucaugccacugcacucuagccucggugaccgaaggagacucugucuc

SEQ ID NO: 6385 - RNA, 99 nt, Homo Sapiens
gaggcaggagaaucacuugaacccgggagguggagguugcagugagcugagauugcgccacugcacuccagccugggcaacagagcgagacuccaucuc

SEQ ID NO: 6386 - RNA, 100 nt, Homo Sapiens
gaggcaggagaaucacuugaaccugggaaauggagguugcagugagccaagauugagccacugcacuccagccugggcaacaagagugaaacucugucuc

SEQ ID NO: 6387 - RNA, 100 nt, Homo Sapiens
gaggcaggagaaucacuugaaccugggagauggagguugcggugagccgagaucgcaucacugcacuccagccugggcaacaagagcgaaacucugucuc

SEQ ID NO: 6388 - RNA, 100 nt, Homo Sapiens
gaggcaggagaaucacuugaaccugggagguggagguugcagugagucgagauggcgccacugcacuccagccugggcaacaagagugaaacuccgucuc

SEQ ID NO: 6389 - RNA, 99 nt, Homo Sapiens
gaggcaggagaaucauuugaaccugggaaguggagguugcagugagccaagaucgugucacugcacucuagccuaggugauaaagcgagacucagucuc

SEQ ID NO: 6390 - RNA, 99 nt, Homo Sapiens; identical to SEQ ID NO: 6389

SEQ ID NO: 6391 - RNA, 99 nt, Homo Sapiens
gaggcaggagaaucgcuugaacccaggagauggagguugcagugagcugagaucacgccacugcacuccagccugggcaacagagugagacuccgucuc

SEQ ID NO: 6392 - RNA, 100 nt, Homo Sapiens
gaggcaggagaaucgcuugaacccaggaggcggagguugcagugagccaagauugcgccacugcacuccagccugggcaacaaaagcaaaacuucgucuc

SEQ ID NO: 6393 - RNA, 100 nt, Homo Sapiens
gaggcaggagaaucgcuugaacccaggaggcggagguuguggugagcgaagaucgugccauugcacuccagccugggcaacaagagcaaaacucugucuc

SEQ ID NO: 6394 - RNA, 99 nt, Homo Sapiens
gaggcaggagaaucgcuugaacccaggagguggagguugcagugugccgagaucgcgacacugcacuccagccugggcaacggagugaaauucugucuc

SEQ ID NO: 6395 - RNA, 100 nt, Homo Sapiens
gaggcaggagaaucgcuugaacccgggaaguggagguugcagugagccgagaucuugccauuguucuccagccugggcgacaagagugaaacuccaucuc

SEQ ID NO: 6396 - RNA, 100 nt, Homo Sapiens
gaggcaggagaaucgcuugaacccgggaggcggaggucguggugagccaaaaucgcaccauugcacuccagccugggcaacaagagugaaacucugucuc

SEQ ID NO: 6397 - RNA, 100 nt, Homo Sapiens
gaggcaggagaaucgcuugaacccgggaggcggagguuguggugagccaagauugcgccauugcacuccagccugggcaacaacagcgaaacucugucuc

SEQ ID NO: 6398 - RNA, 98 nt, Homo Sapiens
gaggcaggagaaucgcuugaacccggggggaggagguuacagugagcugagaucgcgccacugcacuccagccugggcaacaagagugaaacugucuc

SEQ ID NO: 6399 - RNA, 98 nt, Homo Sapiens
gaggcaggagaaucgcuugaaccuggcagguggagguugcagugagccgagaucgcaccauugcacuccagccugggcaacaagcacaaaacugucuc

SEQ ID NO: 6400 - RNA, 100 nt, Homo Sapiens
gaggcaggagaaucgcuugaaccugggaggcagagguuguggugagccgagaugaggucauugcacuccagccugggcaacaagugugaaacuccgucuc

SEQ ID NO: 6401 - RNA, 99 nt, Homo Sapiens
gaggcaggagaaucgcuugaaccugggagguggagguugcagugagccgagaucaugccacugcacuccagccugggcaacagagcgagacuucgucuc

SEQ ID NO: 6402 - RNA, 97 nt, Homo Sapiens
gaggcaggagaaucgcuugaaccugggagguggagguuguggugagccgagaucgcgccauugcacuccagccugggcaagagcaaaacucugucuc

SEQ ID NO: 6403 - RNA, 100 nt, Homo Sapiens
gaggcaggagaaucgcuugaaucuaggaaucagagguugcagugagccaaggucacaccacuugcacuccacagccugggugacagagugagacugccuc

SEQ ID NO: 6404 - RNA, 100 nt, Homo Sapiens
gaggcaggagaaucgcuuuaacccgggaggcagagguuguggugagccgagaucgcgccauugcacuccagccugggcaacaagagcggaauucugucuc

SEQ ID NO: 6405 - RNA, 100 nt, Homo Sapiens
gaggcaggagaaucgguugaacccaggaggcagagguuguggugagccgagaucguaccauugcacuccagccugggcaacaagagcaaaacuccgucuc

SEQ ID NO: 6406 - RNA, 98 nt, Homo Sapiens
gaggcaggagaaucguuugaaccugggaagcggagguugccgugagucgagaucaugccauugcacuccagccugggcaacaagagcgaaacucucuc

SEQ ID NO: 6407 - RNA, 100 nt, Homo Sapiens
gaggcaggagaaucguuugaaccugggaggcggagguuguguugagccgagaucucgccauugcacuccagccuaggcaacaagagcgaaacuccaucuc

SEQ ID NO: 6408 - RNA, 99 nt, Homo Sapiens
gaggcaggagaauggcaugaacccaggaggcggagcuugcagugagccgagauugcgccacugcacuccagccugggcaacggagcaagacuccaucuc

SEQ ID NO: 6409 - RNA, 99 nt, Homo Sapiens
gaggcaggagaauggccugaaccuaggagguggagcuugcagugagccgagauagcgccacugcacuccagccugggcaacagagcgagacucugucuc

SEQ ID NO: 6410 - RNA, 99 nt, Homo Sapiens
gaggcaggagaauggcgcgaacccgggaaguggagcuugcagugagccgagaucgcgccacugcacuccagccugggcaacagagcgaaacuccgucuc

SEQ ID NO: 6411 - RNA, 99 nt, Homo Sapiens
gaggcaggagaauggcgugaacccgggaggcagagcuugcagugagcccagauugcgccacugcacuccagccugggcaacagagcgagacuccgucuc

SEQ ID NO: 6412 - RNA, 99 nt, Homo Sapiens
gaggcaggagaauggcgugaacccgggaggcggagcuugcagugagccgagaucaugccacugcacuccagccugggcaacagagcgagacuccgucuc

SEQ ID NO: 6413 - RNA, 100 nt, Homo Sapiens
gaggcaggagaauuacuugaaaccaggagguggagguugcggugagucgagaucgugccacugcacuccagccugggcaacaagagcaaaacuccgucuc

SEQ ID NO: 6414 - RNA, 97 nt, Homo Sapiens
gaggcaggagaauugcuucaaacugggcagagguugcagugagccaagguugacccacugcacuccagccugggcaacaagagcaaaacuccaucuc

SEQ ID NO: 6415 - RNA, 98 nt, Homo Sapiens
gaggcaggagaauugcuugaacccaggaagcagagguugcggugagcugaaucaugccacugcacuccagccugggcaacagagcagcacuucgucuc

SEQ ID NO: 6416 - RNA, 100 nt, Homo Sapiens
gaggcaggagaauugcuugaacccaggaaguggaggcuucagugagcugagaacacgccacugcacuccaguccugggcaacagagcaagacucugucuc

SEQ ID NO: 6417 - RNA, 99 nt, Homo Sapiens
gaggcaggagaauugcuugaacccaggaggcagaagcugcagugagccaagauagugccacugcacuccagccugggcaacagagcgagacuccgucuc

SEQ ID NO: 6418 - RNA, 99 nt, Homo Sapiens
gaggcaggagaauugcuugaacccaggaggcagaaguugcagugagccgagaucgcaucauugcacuccagccugggcaacagagcgagacucugucuc

SEQ ID NO: 6419 - RNA, 97 nt, Homo Sapiens
gaggcaggagaauugcuugaacccaggaggcggagguuguagugagcugagaucacgccacugcacuccagccugggcaacagagcaagacugucuc

SEQ ID NO: 6420 - RNA, 99 nt, Homo Sapiens
gaggcaggagaauugcuugaacccaggagguggagguugcagugagcugagaccaugccauugcacuccagccugggcaacagagugagacuugguguc

SEQ ID NO: 6421 - RNA, 100 nt, Homo Sapiens
gaggcaggagaauugcuugaacccgggagguggagguugcggugagccgaggucgcgccauugcacuccagccugggcaacaagagcgaaacuccgucuc

SEQ ID NO: 6422 - RNA, 99 nt, Homo Sapiens
gaggcaggagaauugcuugaaccugggaggcagagguugcagugagcugaaaucgcgccacugcacuccagccugggcaauagggcaagacuccgucuc

SEQ ID NO: 6423 - RNA, 100 nt, Homo Sapiens
gaggcaggagaauugcuugaaccugggaggcggagguuguggugagccaaggucgcgccauugcacuccagccugggcaacaagggcaaaacucugucuc

SEQ ID NO: 6424 - RNA, 99 nt, Homo Sapiens
gaggcaggagaauugcuugaaccugggaggugaagguugcagugagcugagaccaugccacugcacuccagccugggcaacagagcaaaacuccgucuc

SEQ ID NO: 6425 - RNA, 100 nt, Homo Sapiens
gaggcaggagaauugcuugaaccugguggggcagagguugcagugagccgagauaacgcuacugcacuccagccugggcaacagaguaaaacuccgucuc

SEQ ID NO: 6426 - RNA, 98 nt, Homo Sapiens
gaggcaggagaauugcuugaacucagggucagaggucgcagugagccgagaucccuccacugcacuccagccugggcaacagagugagucucugucuc

SEQ ID NO: 6427 - RNA, 98 nt, Homo Sapiens
gaggcaggagaauugcuugaacuugaaaggcagagguugcagugagccgaaauugcaccacugcacuccagccuggcgacagagcaagacuccaucuc

SEQ ID NO: 6428 - RNA, 99 nt, Homo Sapiens
gaggcaggagaauugcuugagcccaggaggcggagauugcagugagccgagaucgugccacugcacuccagccugggcaacagagugagacucugucuc

SEQ ID NO: 6429 - RNA, 97 nt, Homo Sapiens
gaggcaggagacucgcuugaacccaggaggcggagguugcagugaggugagauggcgcuacugcacuccagccugggcaacagauugagacugucuc

SEQ ID NO: 6430 - RNA, 99 nt, Homo Sapiens
gaggcaggagaguugcuugaacccaggaagcggagguugcagugagcugagauugccucacugcacuccagccugggcaacagagugaaacaaugucuc

SEQ ID NO: 6431 - RNA, 99 nt, Homo Sapiens
gaggcaggaggaucacuugaguguggaagguugaggcuguagugagccaugauugcaccacugcacuccagccugggcaacagagagacauccuuucuc

SEQ ID NO: 6432 - RNA, 99 nt, Homo Sapiens
gaggcaggaggaucgcuugaacccgggaggcagagguugcagugagccaagauugcgccacugcacuccagccugggcaacagagugagacucugucuc

SEQ ID NO: 6433 - RNA, 99 nt, Homo Sapiens
gaggcagggaaaucgcuugaacccaggagacagagguuucagugagccgagaucgugccacugcacuccagccugggcaacagagugagacucugucuc

SEQ ID NO: 6434 - RNA, 97 nt, Homo Sapiens
gaggcauaagaaucgcuugaauucgggagguggagguugcagugagccaagaucacaccacugcacuccagccugggugacagcaagacucugucuc

SEQ ID NO: 6435 - RNA, 101 nt, Homo Sapiens
gaggccaggagucugagaucagcuugggcaacugauuuaugguuuggauuuguguccaugcccuuccucuucugccaugauuauaaguuuccugaggccuc

SEQ ID NO: 6436 - RNA, 98 nt, Homo Sapiens
gaggcgaagaauugcuugaacccaggagguggagguugcagugagccaagaucaugccacugcacuccagccugggcaacagagcaagacucugucuc

SEQ ID NO: 6437 - RNA, 99 nt, Homo Sapiens
gaggcgggagaauugcuugaacccgggagguggagguugcagugagccgagaucgcgccauugcacuccagccugggcaacagagcaagacucugucuc

SEQ ID NO: 6438 - RNA, 105 nt, Homo Sapiens
gaggcugagacaggagaauugcuugaacccaggagguggagguuucagugagccaagauuguaccacugcacuccagccugggcaacagagcgagacuccgccuc

SEQ ID NO: 6439 - RNA, 105 nt, Homo Sapiens
gaggcugaggaaagaagauugcuugagcccaggaauuagaggcugcaaugagcuaugaucaugccacugcacuccauccuggggagcagagcuagacucugucuc

SEQ ID NO: 6440 - RNA, 105 nt, Homo Sapiens; identical to SEQ ID NO: 6439

SEQ ID NO: 6441 - RNA, 105 nt, Homo Sapiens; identical to SEQ ID NO: 6439

SEQ ID NO: 6442 - RNA, 105 nt, Homo Sapiens; identical to SEQ ID NO: 6439

SEQ ID NO: 6443 - RNA, 105 nt, Homo Sapiens; identical to SEQ ID NO: 6439

SEQ ID NO: 6444 - RNA, 105 nt, Homo Sapiens; identical to SEQ ID NO: 6439

SEQ ID NO: 6445 - RNA, 94 nt, Homo Sapiens
gagggagaauugcuugagcccaggauuucgaggcugcagugagcuaugaucacaccacugcacuccagccugggcaacagagcaagacucuguc

SEQ ID NO: 6446 - RNA, 94 nt, Homo Sapiens
gagggagccacggucagauuucaaguggucauuucacucuuucucccucugggggacugagacaugauuaacuugcaauaauugugacucccuc

SEQ ID NO: 6447 - RNA, 84 nt, Homo Sapiens
gagggcugucaccauuagcacucucggagcugggagaagucccugagcccugaaggguguuuugggcaguaugugacagugcuc

SEQ ID NO: 6448 - RNA, 96 nt, Homo Sapiens
gagggcuuuagaaaugcugugccagagcugcaccccagaccaacaaaaucagacucuccaggaugcggccaaggcaucaguauguggaaagcuuuc

SEQ ID NO: 6449 - RNA, 93 nt, Homo Sapiens
gaggggagauuaaagaaucaauguucccaggggaaaagggccuuaaauuguuuggucuuuucaauggcugacacugucuccaacucuccccuu

SEQ ID NO: 6450 - RNA, 81 nt, Homo Sapiens
gagguaaagcuggggcugggguuccuuaugcaaagagagcugucucuuuaguaggaacucuggauuggcucauuuugcuuu

SEQ ID NO: 6451 - RNA, 87 nt, Homo Sapiens
gagguaaguuugaacccaggagggagagguuguggugagccaagauggcaccauugcacuccagccugggugacagagugagacuuc

SEQ ID NO: 6452 - RNA, 99 nt, Homo Sapiens
gagguaggagaacugcuugaacucaggaggcgggggcugcaaugagcugagaucaagccacugcacuccagccuaugggauagagugagauuccaucuc

SEQ ID NO: 6453 - RNA, 85 nt, Homo Sapiens
gagguaggugcuuuaacugugugcacccugugagguaggugcuuuaacugugugcacauugugagguaggugcugaaacugcuuc

SEQ ID NO: 6454 - RNA, 85 nt, Homo Sapiens
gaggucauaaugugaauguuguaugcaguggccaugucaucagaacaggugugccagcccccugcauggaacauguacaugcuuc

SEQ ID NO: 6455 - RNA, 99 nt, Homo Sapiens
gaggugggaggaucgcuugagcccaggaggucaaggcugcagugaguugugaucaugccacugcacuccagccugggcaacaaagcaagaccccaucuc

SEQ ID NO: 6456 - RNA, 99 nt, Homo Sapiens
gaggugggaggauuacuugagcccaagaggaggaggcugcagugagucaacauugcaccacugcacuccagccugggcaacagagugugaccccaucuc

SEQ ID NO: 6457 - RNA, 98 nt, Homo Sapiens
gaggugggaggauugcuuguuccccggagguugaagcuacagugagccuugauugugucacugcacuccagccugggcaacagguaagacucugucuc

SEQ ID NO: 6458 - RNA, 101 nt, Homo Sapiens
gaggugggagggucacuugagcccagaauuucaaggcugcagugagcuaugauuaagccacugcacuccagccugggcaacagagugagaccuccaacuuu

SEQ ID NO: 6459 - RNA, 104 nt, Homo Sapiens
gaguaaggggcagagcgcugccucucugcaggccgugugcuuugcucgguugaucuugcagagccuaagacacaggcccagagaggcagugaucgccaaagauc

SEQ ID NO: 6460 - RNA, 92 nt, Homo Sapiens
gaguagcaaaggccccagggaaugggcucuguugggacagcuugucuuugguuuccaguaguuacuccucccugaaggggucaagguugcuu

SEQ ID NO: 6461 - RNA, 93 nt, Homo Sapiens
gaguagcugggauuacaggugugugccaccaugucuggcugauuuuuguauuuuuaguagaggugggguuucaccauguuggccaggcugguc

SEQ ID NO: 6462 - RNA, 93 nt, Homo Sapiens; identical to SEQ ID NO: 6461

SEQ ID NO: 6463 - RNA, 100 nt, Homo Sapiens
gagucaggagaaucgcuugaacucgggagguggagguuguggugagcuaagaucacaccauugcacuccagccugggcaacaagagcgaaacuccaucuc

SEQ ID NO: 6464 - RNA, 86 nt, Homo Sapiens
gagucucgcucuguugcucaggcuggagugcaguggugcaaucuuggcucacugcaaccuccaucuccuggguuuaagcgauucuc

SEQ ID NO: 6465 - RNA, 102 nt, Homo Sapiens
gagugaccccaucucuacaaaaaguuuuuuuaaauuagcuaggcauggugguauacacuuguaguccuagcuacuuaggaagcugaggcaggagggucacuu

SEQ ID NO: 6466 - RNA, 101 nt, Homo Sapiens
gaguuugagaucugucugggcaacaugcugaaaccccagcucuguaaacaauacaaaaauuagcugggcguggcggucugugccuacagucccagcuacuc

SEQ ID NO: 6467 - RNA, 103 nt, Homo Sapiens
gauacauaguggucacuuccauuuaagauguuugcauuucagcacuuuuauaauucaaauauggugcugucccuugagacucuuguugagagccacauguauc

SEQ ID NO: 6468 - RNA, 87 nt, Homo Sapiens
gauauguuucuacuagugguugauggccucuuucagcuccaucgcuauggaggcgagguucaucaauaacucagagaaacuuguguc

SEQ ID NO: 6469 - RNA, 93 nt, Homo Sapiens
gaucauaagcucccugaaaacacguugcaucugugucucuagcaacuuccacaaauguuuggagaauaaauuaauguguggcagggcgcgguc

SEQ ID NO: 6470 - RNA, 98 nt, Homo Sapiens
gaucauuugagaccagaaguuccaggcuguagugcacuaugaugaucguacguaugaacagccauugcacuccagccugggcaauucagcaagacauc

SEQ ID NO: 6471 - RNA, 111 nt, Homo Sapiens
gauccagauagaugauauguuucuacuagugguugauggccucuuucagcuccaucgcuauggaggcgagguucaucaauaacucagagaaacuuguguccagaguugguc

SEQ ID NO: 6472 - RNA, 130 nt, Homo Sapiens
gaucccaaaaacucaucucagucuauguccuugcuauguauguacaaaaaugagaaauguaaauuguguuuaaaaaccuuaucucauuacauacuuucucaaaccacucuuugagugucauuuuuggguc

SEQ ID NO: 6473 - RNA, 88 nt, Homo Sapiens
gaugaggugaaagagaugggacagugacuguaucuguucugaugaaggagauugugcaguuacaugcguaacgucauuaaacuucauu

SEQ ID NO: 6474 - RNA, 76 nt, Homo Sapiens
gaugggauggagcaagaggugaagaucuuggagucuggaaucagaccaccuggauuuucauccuaguuccccgauc

SEQ ID NO: 6475 - RNA, 79 nt, Homo Sapiens
gauggucucauaacugaauauauuaaaaacuuaaauuguauacuuuaaguuggugauuguaugauauaugaguuuuauc

SEQ ID NO: 6476 - RNA, 60 nt, Homo Sapiens
gauguguucaagaaaauuuauugcagcauuguuugcaauagugaaaaaacugaacucauc

SEQ ID NO: 6477 - RNA, 94 nt, Homo Sapiens
gauucaaagcaagaugguagcauuggagaggaugagauauggucagaugaggauauauuuuaaaaguugagcuaacaggauuugcugaggaauc

SEQ ID NO: 6478 - RNA, 89 nt, Homo Sapiens
gauucuguugaggauauaucccuaugaugucccugggaagcgauggggcauucccagucaucugggaugugcaguuucuaaauauuauc

SEQ ID NO: 6479 - RNA, 77 nt, Homo Sapiens
gcaaagcaaguggcuuggagagauagugauuuagcucaagagggagugagaugugacuguugccacauguuaaaugc

SEQ ID NO: 6480 - RNA, 85 nt, Homo Sapiens
gcaaagcacuuacuucuuugcagaugagacugagacauaguuacaaagucucaguuuccucugcaaacaguuguaagugcuuagc

SEQ ID NO: 6481 - RNA, 84 nt, Homo Sapiens
gcaaggugcuagguuuuuuccuuuccccaccugucucuuagccuggggaauuaaaugagaagccuuagaauggguggcccuugu

SEQ ID NO: 6482 - RNA, 74 nt, Homo Sapiens
gcaagguuugggaaauaagcugauaguaaagucauguaacacuuucugugcagguuaacauuucuggaccuugc

SEQ ID NO: 6483 - RNA, 87 nt, Homo Sapiens
gcaaugcuguuuacuuauaggaugaaacuguaucagacuuuguaguggcugugcauguugauauccuggccaguaggcagugcgugc

SEQ ID NO: 6484 - RNA, 82 nt, Homo Sapiens
gcacagugagagaaacagacuccaccacaccuucuuggcugugcaaggaagucagaugauguuggagucugugcuacugugc

SEQ ID NO: 6485 - RNA, 113 nt, Homo Sapiens
gcaccagaaaguccaggaagagcugauuaaaguguuagcuggcugacacauuaugguggugugguagaaagugucucauuuuaauaagucacagugcugccuaaucugugugc

SEQ ID NO: 6486 - RNA, 91 nt, Homo Sapiens
gcacccugugagguaggugcuuuaacugugugcacccugugagguaggugcuuuaacugugugcacauugugagguaggugcugaaacugc

SEQ ID NO: 6487 - RNA, 76 nt, Homo Sapiens
gcagaggcagaugggacucugugcccauugaagaacuugggaguguauucugggaacaggcacccaucuucucugc

SEQ ID NO: 6488 - RNA, 89 nt, Homo Sapiens
gcagcaggcagggccaggcagggccgggccuggggccugguguccgaccgcagcccagccccccucaucgccugacacucugccucugc

SEQ ID NO: 6489 - RNA, 80 nt, Homo Sapiens
gcagcauggaagaauaggcaguauuggauuugaaaucaggagacuuggaauugaauucugccucuuccacuaccagcugu

SEQ ID NO: 6490 - RNA, 81 nt, Homo Sapiens
gcagcgacgcugaguuucaagaaagccaagauggcugaguccacaggcucacccacgggugcguuuagacugggaugcugc

SEQ ID NO: 6491 - RNA, 69 nt, Homo Sapiens
gcagcugcagaaaacacagccgaguugcuagcuaaggggaaacagacgccgcugugggaaagcacuugu

SEQ ID NO: 6492 - RNA, 93 nt, Homo Sapiens
gcaggaggauugcuugagcccaggaguucaaggcuacaaugagcuaugaucacacuacuacacuccagccugggcaacagagcaagacccugu

SEQ ID NO: 6493 - RNA, 103 nt, Homo Sapiens
gcaggcagggagagggaggaggugaaggaacaaaugcugaacaccuguuauuuaugaagcacucuacauauguucuuucauuucacuccuggugaaaaccugc

SEQ ID NO: 6494 - RNA, 89 nt, Homo Sapiens
gcagggagacuggagagaaagcgaagauguagcccaaagccauagugcuuugugugcccugcaacugagcuuucccugcagcuuucugu

SEQ ID NO: 6495 - RNA, 99 nt, Homo Sapiens
gcagggagagggaggaggugaaggaacaaaugcugaacaccuguuauuuaugaagcacucuacauauguucuuucauuucacuccuggugaaaaccugc

SEQ ID NO: 6496 - RNA, 88 nt, Homo Sapiens
gcagggauucauggacuagguuugcaccuucugaaccaugagcuagaccaugucuggaggcuggaaccuggugacccaggcucccugc

SEQ ID NO: 6497 - RNA, 85 nt, Homo Sapiens
gcagguaugauggccuuuucucuuauccugguuccugcagagcugacugccaugcuugggagagggaaaagacuuauuugccugu

SEQ ID NO: 6498 - RNA, 111 nt, Homo Sapiens
gcagguccaucuucaguggcauugggccuuggcugggaugcugaguuauccacuggagcaucggcaguacaggcaggcacagaggcaguggauccaucggagguggcaggu

SEQ ID NO: 6499 - RNA, 117 nt, Homo Sapiens
gcagucugcgggaccagacuauugugacauggagaauguagagaaauuauucaauguucaggaucaacaugaucuccucacucuaggauggauccauacacaucccacucaaacugc

SEQ ID NO: 6500 - RNA, 108 nt, Homo Sapiens
gcaucuugacacauguucugugcuccaggucccaguaacugugcccauccauuguuaccacaggucacaguggcccuggcccuggggcauuauacucucucuuggugu

SEQ ID NO: 6501 - RNA, 80 nt, Homo Sapiens
gcauuaaaauaauuaaagugucugaggccuuccccuucaauaaaucugggauugggcccaggcaacuguguuuuuuaagc

SEQ ID NO: 6502 - RNA, 79 nt, Homo Sapiens
gcauugcuugaguccaggaggucaaggcugcagugagucaaggucaugccacugcacuccauccugggacagagcaagc

SEQ ID NO: 6503 - RNA, 90 nt, Homo Sapiens
gcccaggcuagaauucaguggcaggaucauagcucacugcagccucgaacuccuaggcucaagcaauccuccugcuucugccuccugggu

SEQ ID NO: 6504 - RNA, 83 nt, Homo Sapiens
gccccugcccaagagauccacuuuauuuucaucucacccagaauauugaggugaucagcaagguggagugguugggagagggu

SEQ ID NO: 6505 - RNA, 92 nt, Homo Sapiens
gcccggugcucgguuuguaggcagugucauuagcugauuguacuguggugguuacaaucacuaacuccacugccaucaaaacaaggcacagc

SEQ ID NO: 6506 - RNA, 114 nt, Homo Sapiens
gcccuaaacgaagggggccucaaguuacgacuucucaaggcagugacaucuuccucaauugguaugaguagcugccaggcaacaaguacguauaagagugucccauauucuggc

SEQ ID NO: 6507 - RNA, 105 nt, Homo Sapiens
gcccugaacucaggggcuucgccacugauuguccaaacgcaauucuuguacgagucugcggccaaccgagaauuguggcuggacaucuguggcugagcuccgggc

SEQ ID NO: 6508 - RNA, 107 nt, Homo Sapiens
gcccuuagaaauuguuaugauugucccagaaauccaggcuuaaaugauacucagguguaauauucaagauaagggucugggagaauauaaaauauuaauuugagggu

SEQ ID NO: 6509 - RNA, 74 nt, Homo Sapiens
gcccuucagucucaguagccacauuucaagugcucaauaguuacaugugcccaguggcugcuggacuggguggu

SEQ ID NO: 6510 - RNA, 96 nt, Homo Sapiens
gccguagaagagagccagcaugguguggcagaaggcucuggauuaguccuggguucuaguucugggucuucuacaaaccagcuccaugaauuaggc

SEQ ID NO: 6511 - RNA, 76 nt, Homo Sapiens
gccucuggacaauacuguuaaaacuaaauacuugccaggugugguggcucacaccugugauaguucuuuuggaggc

SEQ ID NO: 6512 - RNA, 88 nt, Homo Sapiens
gccugcgggguauuguagaaacgcugcgcugccuaucacagcuugugaugugacacguucauucugcaaguuuaaacuucgccuaggu

SEQ ID NO: 6513 - RNA, 87 nt, Homo Sapiens
gccuugcagugaaggaggcaugugaucaccaucaaagucuucugcucugggaaggaucacacagucguccuucagccugccuggggc

SEQ ID NO: 6514 - RNA, 77 nt, Homo Sapiens
gccuuggcuucccaaagugcuaggaauacaggugugagccaacaugccuguccuguaaguauuuuuuaaaacaaggc

SEQ ID NO: 6515 - RNA, 108 nt, Homo Sapiens
gcgaucucuuaacaauuuccgggcugaacagccucaccagcaugccauguacuaccuccgcuugcugaugacugaaguggccuggacuaaagaugaguuaaaagaagc

SEQ ID NO: 6516 - RNA, 101 nt, Homo Sapiens
gcgcugucuuccugggcucagcauccugggacacaggacauuguaguggagcaucccaaccugaaacuuugucucaguguagagacccagaaagauggggu

SEQ ID NO: 6517 - RNA, 70 nt, Homo Sapiens
gcgggcuaggcagucucaguuguuggguuuucuuagugaaauaagcagcaacaaacgacaacaaaaccgc

SEQ ID NO: 6518 - RNA, 86 nt, Homo Sapiens
gcgucacggaaugcuguccugaucccuagcauuuacucacaugcugugcuuagugcuugaccaugugguggcagauucugugaugu

SEQ ID NO: 6519 - RNA, 72 nt, Homo Sapiens
gcgugaaccugggaggcggagcuugcagugagccgagaucgugccacugcacuccagccugggcaacagagc

SEQ ID NO: 6520 - RNA, 102 nt, Homo Sapiens
gcguuccugggaaaaccauuuagauuucauucuccuuccuuucucugacagaagcugcuggugaggaagguaaugaucuugaucaaaccauccccagaaugc

SEQ ID NO: 6521 - RNA, 129 nt, Homo Sapiens
gcuacucaggaggcugaggcaggaggaucacuugagccugggaggucuaggcugcagugagccgggacgaugccacugcacuccagccugggcaacagagugagacccugucccagcacucugggaggc

SEQ ID NO: 6522 - RNA, 96 nt, Homo Sapiens
gcuacuucuaugugucccaugguacugccacagaagagucucagcucucuccaggauucaguucuaaggucagugccuaagauaaaaauggagugu

SEQ ID NO: 6523 - RNA, 91 nt, Homo Sapiens
gcuaggauugcaccacugcacuccaaccuggacaacagagcaagacccugucucuaggccaggugcaguggcucacaccuguaaucccagc

SEQ ID NO: 6524 - RNA, 91 nt, Homo Sapiens; identical to SEQ ID NO: 6523

SEQ ID NO: 6525 - RNA, 91 nt, Homo Sapiens; identical to SEQ ID NO: 6523

SEQ ID NO: 6526 - RNA, 91 nt, Homo Sapiens; identical to SEQ ID NO: 6523

SEQ ID NO: 6527 - RNA, 131 nt, Homo Sapiens
gcuagucacuggggcaaagaugacuaaaacacuuuuccugcccucgaggagcucacagucuaguaugucucauccccuacuagacugaagcuccuugaggacagggauggucauacucaccucgguguugc

SEQ ID NO: 6528 - RNA, 104 nt, Homo Sapiens
gcuaguguggacacacagcucuuggaaagcauguacauuuggaggauauagugucuucuaaauaauuauacacuuucuaugagaguaggguggcuuacaguggc

SEQ ID NO: 6529 - RNA, 89 nt, Homo Sapiens
gcuaucaguucuugcuauucucagagcacucuaucauguuuuuagguguauauuguguauucaggauagcauuaaaaagaacugauggc

SEQ ID NO: 6530 - RNA, 107 nt, Homo Sapiens
gcuauugugacaaucuugguuaccauccauuaagugcugcugauuuuggaaagaucaugaaaaacgucuuuccaaacaugaaggcacgucguuugggcacaagaggc

SEQ ID NO: 6531 - RNA, 110 nt, Homo Sapiens
gcucacaaaaccuagguggggaugaaagcugagaaagcgaagaggugguucaggggaucacucuuuccuacuuguuccucucaccucaaacucaccuucuacugcacagc

SEQ ID NO: 6532 - RNA, 123 nt, Homo Sapiens
gcucacacagcaagucuuugucaaagcuuaggaauggaaguagguuguccccuccuagucaugggaucucuccaacucacuagacaaucuugcuuuacgugcugaugaacaugcucugugagc

SEQ ID NO: 6533 - RNA, 74 nt, Homo Sapiens
gcuccugcuugcauaugcauggguacacagccuguaacuacaugugugugagccuguggguaugugaggggagu

SEQ ID NO: 6534 - RNA, 72 nt, Homo Sapiens
gcucgaacccagaagguggaguuugcagugagccgagaucgugccacugcacuccagccugggcaacacagc

SEQ ID NO: 6535 - RNA, 72 nt, Homo Sapiens
gcucgaacccgggagacagagguugcagugagccgagauugugccacugcacuccagccugggcaacagagc

SEQ ID NO: 6536 - RNA, 113 nt, Homo Sapiens
gcucguugcccaggcuggagugcaauggcgugaucuuggcucaccacaaccuccacuucccagguucaagcgauucucaugccuuagccucccaaguagcugggauuacaggc

SEQ ID NO: 6537 - RNA, 111 nt, Homo Sapiens
gcucugucuugagaaucgagaaauauggggcucuuuucugucuuugcgauuuuggcuaucaauuuguagcagaacacuggguccaguuucuucauuaucucuuuacugagc

SEQ ID NO: 6538 - RNA, 108 nt, Homo Sapiens
gcucuucccauaccaugcauuccuagccccacagaaauccacuagucugggcuuucucugcgauuggcugaggcagcaacuggugaggcaccugggcugugcaggagc

SEQ ID NO: 6539 - RNA, 76 nt, Homo Sapiens
gcucuuguugcccaggcuggagugcaguggcaugaucucagcucacugcaaccucugccaccuggguucaagcugu

SEQ ID NO: 6540 - RNA, 90 nt, Homo Sapiens
gcucuuuaagaaguaagcagaacuguuuuguuuucugugcugcuuagugcaggacaauauagagcagaucuggcucugccccuuagcagc

SEQ ID NO: 6541 - RNA, 90 nt, Homo Sapiens
gcugcaguggaaaggaguuugugacauugacauugacagcaugaaaaugggucuugccagugcaugugagacugccucccaacacucagc

SEQ ID NO: 6542 - RNA, 98 nt, Homo Sapiens
gcugcauccugccuggcucccaggaggccucucucagcauuuucugacaacaaagccggggcugcagaucccuggugagauuccaggcuagcaucagc

SEQ ID NO: 6543 - RNA, 74 nt, Homo Sapiens
gcugcugcugaagucaccugaaaacucaacuaagcuaaagagccuagauggguuacucagaugacuggcagugc

SEQ ID NO: 6544 - RNA, 99 nt, Homo Sapiens
gcugcuuuccuaucuuacccuuccugcucuccuuuuuguagugaugaggaacaaugaaaaagagguaguguaaggaauugugaggcugggcaugguggc

SEQ ID NO: 6545 - RNA, 99 nt, Homo Sapiens
gcuggauauugcuaagaauucagguagucucgggaucuccagagucuccauacuaggacaggagaucuucagaaccuggaggaauggaaauagucuagu

SEQ ID NO: 6546 - RNA, 102 nt, Homo Sapiens
gcuggaugaugaauccuuguuuuucagguggcuccaaaaagaauguugcauguguucagaccauccugagcagagccaccaaauuuagugacagugucuagc

SEQ ID NO: 6547 - RNA, 71 nt, Homo Sapiens
gcuggggagggaguuuacauguuuucuaauggagccauuaucuguuggaggcauucauuccccucaccagc

SEQ ID NO: 6548 - RNA, 86 nt, Homo Sapiens
gcuguaacacagagcagguuuggaauggcuccacccacagggccacaagaaacaaacccauggagaguuccagaucuguuugcagc

SEQ ID NO: 6549 - RNA, 85 nt, Homo Sapiens
gcugucagaucagguuccugauuggaguucucuuaucugcucugguuuggagggcugccccauucgggaaucuguuuuguuuugc

SEQ ID NO: 6550 - RNA, 92 nt, Homo Sapiens
gcuguccugaggccuggagauacuagaggguaaaggaauggaaccaugucuggggucccuuuaguaacuugcagggucugggaauugacugc

SEQ ID NO: 6551 - RNA, 85 nt, Homo Sapiens
gcuguccuggagcuguuggagaaauggggaagaucaucuagauauuccaguuucuccuuccacucacccuauaguaccggauagc

SEQ ID NO: 6552 - RNA, 104 nt, Homo Sapiens
gcugucuauuaugagucugacuggcacagacaucugucaaggaagaaggauucuuugagcguauuugugucagucaacugcauauauggaccacaacagaaagc

SEQ ID NO: 6553 - RNA, 85 nt, Homo Sapiens
gcuguuggugaguauggagaucucugcccuugucagaggaaggcuuccucaucacaaggcagggcaggugucugugcccaagagc

SEQ ID NO: 6554 - RNA, 109 nt, Homo Sapiens
gcuuacaauugcugguaccugguagcauuuauuuucccucaaguaccuaguaaccuuaugaagguagggaggguagaugcucuaccacauuccuucagcuguauugagu

SEQ ID NO: 6555 - RNA, 108 nt, Homo Sapiens
gcuucacuuucaggggcaagguuugggaaauaagcugauaguaaagucauguaacacuuucugugcagguuaacauuucuggaccuugcuuuccuucucaguguaugc

SEQ ID NO: 6556 - RNA, 131 nt, Homo Sapiens
gcuucaucauccugguucaagcaguguuucuucucuaucaggccugguggcuguuguuuugggcuccccaaggcgagaggcggcccuggacaaguggguuggaagacacggugaccagagaagagggaagc

SEQ ID NO: 6557 - RNA, 74 nt, Homo Sapiens
gcuuccucaccaccuugugcacugcugcucccacaccacagugacuagcagcacauaaugguuugaauuaaagc

SEQ ID NO: 6558 - RNA, 72 nt, Homo Sapiens
gcuugaacccaggaaguggagguugcagggagccaugaucgcaccacugcacuccagccugggcaacagagc

SEQ ID NO: 6559 - RNA, 72 nt, Homo Sapiens
gcuugaacccaggagacugagguugcagugagcugagaucaugcaacugcacuccagccugggcaacacagc

SEQ ID NO: 6560 - RNA, 73 nt, Homo Sapiens
gcuugaacccaggaggcggagguugcagugagccaagauugcgccacugcacuccagccugggcaacaaaagc

SEQ ID NO: 6561 - RNA, 73 nt, Homo Sapiens
gcuugaacccaggagguggaggcugcaguaagccgagauugugccacugcacuccagccugggcaacaagagc

SEQ ID NO: 6562 - RNA, 73 nt, Homo Sapiens
gcuugaaccugggauguggagguuguagugagcugagauugggccauugcacuccagccugggcaacaagagc

SEQ ID NO: 6563 - RNA, 70 nt, Homo Sapiens
gcuugaacucgggguggagguugcagugagccaagaucgccccacugcacuccagccugggcaacaaugc

SEQ ID NO: 6564 - RNA, 72 nt, Homo Sapiens
gcuugaguccaggagguggagguugcagugaacagagauugugucacugcacucuagccugggcaacagagc

SEQ ID NO: 6565 - RNA, 77 nt, Homo Sapiens
gcuugcuggguuuacagauggcaaagaucuggcaaauuaaaaauagccuuaggccaaagaucaaacccaaggugggc

SEQ ID NO: 6566 - RNA, 89 nt, Homo Sapiens
gcuuggcaucaguuucauuuugcaaaacauggcuuugauaauugcaucagaucugcaaggcuguguaggcagaauucuuauugccaagu

SEQ ID NO: 6567 - RNA, 104 nt, Homo Sapiens
gcuugguaugcucagaagcugcuaaaguguguaugggcaggugugggggcaauuucuugguccuagcacuuccauauaucgacuuucuuuucuggcugcuaagu

SEQ ID NO: 6568 - RNA, 78 nt, Homo Sapiens
gcuuugaaagagauguggugugugaagacgaagaugccuuuuguuugucuuuggagaauauugcaacacuacaaaagu

SEQ ID NO: 6569 - RNA, 92 nt, Homo Sapiens
gcuuugaugaccagguuucauuagguaagaaggcccgauuaagcaacgguggcccaaauaaccucagugguucagacacuguuuuucaaagc

SEQ ID NO: 6570 - RNA, 109 nt, Homo Sapiens
gcuuuggccuuuaacaacucaguguuuuggucuaaucuucaagaggaauuugagguucacuugaauaaguuagacuaguuugagguggguguagcuagaggauugaagu

SEQ ID NO: 6571 - RNA, 99 nt, Homo Sapiens
ggaaaagaaccauggguuaggccuuuuugggaagagacaguucagcuuuugauguaaaacagcuguaccuucugagagagguagccccaugucuucauc

SEQ ID NO: 6572 - RNA, 77 nt, Homo Sapiens
ggaaaaugaguggaagaccuggcucccucucuucucucccguuaggcacaagacgguguaaauccuggucuuccucc

SEQ ID NO: 6573 - RNA, 77 nt, Homo Sapiens
ggaaacuggggccuucuuugaguacuagugaguaagacauuuugcaacagugcugaguaugaaaggcccuggucucu

SEQ ID NO: 6574 - RNA, 81 nt, Homo Sapiens
ggaaagaauaaaggcuuggacucagccuagguucaaguacugcaucuugaccuggccuguaggcaagucuuuucacuucuc

SEQ ID NO: 6575 - RNA, 118 nt, Homo Sapiens
ggaaauguggagaauuaaaaaggguagugaggcuggcauuuauagaaucuggcuuucuuguauuggguggaaagcuagaugaaaccaguuucucucagccuuuucucuccucaggucu

SEQ ID NO: 6576 - RNA, 75 nt, Homo Sapiens
ggaacagcagggcuagaaagccagagagacaggggcucuggcccuuucugaugcuguuuuuagcaccugcuuucc

SEQ ID NO: 6577 - RNA, 101 nt, Homo Sapiens
ggaacaguacacucacggcacccuggagaggagcggucacugguugcugagugaauuaaccgaauguuugcugcuuuucuccugcaacaguucauuauucc

SEQ ID NO: 6578 - RNA, 97 nt, Homo Sapiens
ggaacgagaauugcuugaacccaggaggcaaagguugcagugagucaagaucaugccacugcacuccugccugggugacagagugagaccuugucuc

SEQ ID NO: 6579 - RNA, 127 nt, Homo Sapiens
ggaagcaucccugcugcggacgcuuucacuucuaaagagucuugucugcuaauaagagugcccauggcccaggguggcagcagggggauuuagaaagggcaugaugauggcacuagcggcugcuuuc

SEQ ID NO: 6580 - RNA, 130 nt, Homo Sapiens
ggaagccuucccuuaccucagccugguugagggcccccugggcuguuuucacugguugaugguaucugaucccuuccagccugagguuccuggagggccaguccaggucugaggucugguucaugcuucc

SEQ ID NO: 6581 - RNA, 89 nt, Homo Sapiens
ggaagugaaagagggaagucucucuccccaucccuccucucaguuaccaugaggaugggcaguuucuucccuuuccguucuucacuuuc

SEQ ID NO: 6582 - RNA, 96 nt, Homo Sapiens
ggaauaagaaaggcaacguuuugcagcuuccaaauuucugaagaaacuaaucucagauuggcaguuaaagucaaaauguugccaaauauuuauucc

SEQ ID NO: 6583 - RNA, 92 nt, Homo Sapiens
ggaaucuugcuuuguagcccaggcuggagugcaguggugugaucuuggcucacggcaaccucugccucccgggucuaggcucaagcaguucu

SEQ ID NO: 6584 - RNA, 94 nt, Homo Sapiens
ggaaucuugcuuuguagcccaggcuggagugcaguggugugaucuuggcucacggcaaccucugccucccgggucuaggcucaagcaguucucc

SEQ ID NO: 6585 - RNA, 119 nt, Homo Sapiens
ggaauguucugaagaacugggugaucuugugaaaucuguggacccuacauuggcacuuaguguguaccuaagggcuaacgucccaaauaaagucauucagugcuuugcagaaacagguc

SEQ ID NO: 6586 - RNA, 128 nt, Homo Sapiens
ggacaucaaagaauaaauaagcugcucuaauugccaagaauucacaugugguuguaugcagcuuuacugggagacugaaguguaucugcaugugauucugcugugauggacacuuguaaguuugugcc

SEQ ID NO: 6587 - RNA, 128 nt, Homo Sapiens; identical to SEQ ID NO: 6586

SEQ ID NO: 6588 - RNA, 85 nt, Homo Sapiens
ggaccagacuauugugacauggagaauguagagaaauuauucaauguucaggaucaacaugaucuccucacucuaggauggaucc

SEQ ID NO: 6589 - RNA, 85 nt, Homo Sapiens
ggaccagacuauugugacauggagaauguagaggaauuauucaauguucaggaucaacaugaucuccucacucuaggauggaucc

SEQ ID NO: 6590 - RNA, 81 nt, Homo Sapiens
ggaccauugaggagguggggcagcagcaggacccccagaaccgaagccugugucucugcugucucaucccuucauucuucc

SEQ ID NO: 6591 - RNA, 86 nt, Homo Sapiens
ggaccuggagugcaucaggaucugaccagauaggaguuuuugccucgugucugggugcuacgauuuugugccguucucugaggucc

SEQ ID NO: 6592 - RNA, 101 nt, Homo Sapiens
ggacuacaggcacaugcaaccacaucuggcuaauuuucuugaguuuuaguagagacugggucucauuauguuguccaggcuggucccaagcuccugaguuc

SEQ ID NO: 6593 - RNA, 101 nt, Homo Sapiens
ggacuacaggcacaugcaaccacgucuggcuaauuuucuugaguuuuaguagagacugggucucguuauguuguccaggcuggucccgagcuccugaguuc

SEQ ID NO: 6594 - RNA, 101 nt, Homo Sapiens; identical to SEQ ID NO: 6593

SEQ ID NO: 6595 - RNA, 101 nt, Homo Sapiens; identical to SEQ ID NO: 6593

SEQ ID NO: 6596 - RNA, 101 nt, Homo Sapiens; identical to SEQ ID NO: 6593

SEQ ID NO: 6597 - RNA, 95 nt, Homo Sapiens
ggacugaaagagaacugggauggaggagaauuagaggauggugugguguuucccaagacauccccugaucuugcuaucccagcaucuccuagacc

SEQ ID NO: 6598 - RNA, 83 nt, Homo Sapiens
ggacugcuugagcccaggagguggagucuguagugagcugugauccugccacugcacuccagccugggcaacagagcaagacc

SEQ ID NO: 6599 - RNA, 83 nt, Homo Sapiens
ggacugcuugagcccaggagguugagguugcagugaaccaugaucaugucacugcacuccagccuggguaacagagugagacc

SEQ ID NO: 6600 - RNA, 93 nt, Homo Sapiens
ggagaagaggucuugcauaccagcacaguggauggggaauggugugaccucugucccugcucucuucucugcuggcuuaagggucuauucucc

SEQ ID NO: 6601 - RNA, 92 nt, Homo Sapiens
ggagaauagcuugaaccugggagguggagcuuacagugagccaccgagauugugucauugcacuccagccugggcaacaagagcaaaucucc

SEQ ID NO: 6602 - RNA, 88 nt, Homo Sapiens
ggagaaucacuagaaccuggaaggcgaagguugcagugagcggagaucgugccacugcacuccagccugggcaacagagcgauacucc

SEQ ID NO: 6603 - RNA, 87 nt, Homo Sapiens
ggagaaucacuuaagcccaggaauuugaggcugcagugagcaaugacugugccacuguacuucagccuggguaacagaggggacuuc

SEQ ID NO: 6604 - RNA, 88 nt, Homo Sapiens
ggagaaucacuugaacccaggaagaggagguugcaguaagccgagaucgugccacugcacuccagccugggcaacaaagugagauucc

SEQ ID NO: 6605 - RNA, 88 nt, Homo Sapiens
ggagaaucacuugaacccaggagacggagguugcagugagcccagaucgcgccacugcacuccagccugggcaacagaauaagacucc

SEQ ID NO: 6606 - RNA, 89 nt, Homo Sapiens
ggagaaucacuugaacccaggagacggaguuuguggugagccgagaucacaccauugcacuccagccugggcaacaacagugaaacucc

SEQ ID NO: 6607 - RNA, 88 nt, Homo Sapiens
ggagaaucacuugaacccaggaggcgaagguugcagugagcuaagaucgcaccacugcacuccagccugggcaacagagugacauucu

SEQ ID NO: 6608 - RNA, 88 nt, Homo Sapiens
ggagaaucacuugaacccaggagguggagguugcagugagccaagaucgugccacugcacuccagccugggugauagagcaagacucc

SEQ ID NO: 6609 - RNA, 89 nt, Homo Sapiens
ggagaaucacuugaacccaggagguggagguuguagugagcugagauugcaccacugcacuccagccugggcgauaagagugaaacucc

SEQ ID NO: 6610 - RNA, 93 nt, Homo Sapiens
ggagaaucacuugaacccaggaguuagagguugcagugagcccaaaaucacaccacuguacuccagccugccuggguaauagagugagauucc

SEQ ID NO: 6611 - RNA, 90 nt, Homo Sapiens
ggagaaucacuugaacccgggaaggcggagguugcagugagccgagaucgugccacugcacuccagccugggcaacaagagugagacucc

SEQ ID NO: 6612 - RNA, 88 nt, Homo Sapiens
ggagaaucacuugaacccgggagguggagcuugcagugagcugagaucacgccacugcacuccagccugggcaacagagccagacucc

SEQ ID NO: 6613 - RNA, 89 nt, Homo Sapiens
ggagaaucacuugaacccgggagguggagcuugcggugagccgagaucgcgccauugcacuccagccugggcaacaagagugaaacucc

SEQ ID NO: 6614 - RNA, 88 nt, Homo Sapiens
ggagaaucacuugaacccgggagguggagguugcagugagcugagauugcgccacugcacuccagccugggcaacagagcgagacucc

SEQ ID NO: 6615 - RNA, 91 nt, Homo Sapiens
ggagaaucacuugaaccugggaggcagagguuguugcagugagccgagauugcaccacugcacuccagccugggugacagagugagacucc

SEQ ID NO: 6616 - RNA, 88 nt, Homo Sapiens
ggagaaucacuugaaccugggaggcggagguugcagugagccgagauugagccauugcacuccagccuggacaucagggcgagacucc

SEQ ID NO: 6617 - RNA, 88 nt, Homo Sapiens
ggagaaucacuugaacucgagaggcggagguugcagugagcugagaucccgccacugcacuccagccugggugacagagcgagacucc

SEQ ID NO: 6618 - RNA, 87 nt, Homo Sapiens
ggagaaucacuugaacucgggaggggaggcugcagugagccaagaucacacaccacugcacuccagccugggcaacaaagugagacc

SEQ ID NO: 6619 - RNA, 88 nt, Homo Sapiens
ggagaaucacuugaacucgggaggggaggcugcagugagccaagaucacacaccacugcacuccagccugggcaacaaagugagaccc

SEQ ID NO: 6620 - RNA, 88 nt, Homo Sapiens
ggagaaucacuugagccccggaggcagggguugcagugagcugagauugugccacugcacuccagccugggcaacagagugaaacucc

SEQ ID NO: 6621 - RNA, 89 nt, Homo Sapiens
ggagaaucacuugagcccuggaggcagaagaugcagugagccugggucaugccacugcacuccagccugggcaacaagagugagacucc

SEQ ID NO: 6622 - RNA, 88 nt, Homo Sapiens
ggagaaucacuuuaaccagagaguuggagguugcagggagccgagaucgcaccacugcacuccagccugggugacaaagcgagacucc

SEQ ID NO: 6623 - RNA, 89 nt, Homo Sapiens
ggagaaucauuugaacccaggagguggaaguugcagugagcucagaucgcaccauugcacuccagccuggguaacaagaaugaaacucc

SEQ ID NO: 6624 - RNA, 88 nt, Homo Sapiens
ggagaaucauuugagcccaggaagcagagguugcagugagccaagaucacgccacugcacuccagccugggcaacagagugagacucc

SEQ ID NO: 6625 - RNA, 88 nt, Homo Sapiens
ggagaaucgcuugaacccagaaggcagagguugcagugagccaagauggugccacugcacuccagccugggcaacagagcgagacucu

SEQ ID NO: 6626 - RNA, 88 nt, Homo Sapiens
ggagaaucgcuugaacccaggaaguggagguugcagggagccaugaucgcaccacugcacuccagccugggcaacagagcaagacucc

SEQ ID NO: 6627 - RNA, 89 nt, Homo Sapiens
ggagaaucgcuugaacccaggaaguggagguugcagugagccaauauugugccauugcacuccagcuugggcaacaagagcgaaacucc

SEQ ID NO: 6628 - RNA, 88 nt, Homo Sapiens
ggagaaucgcuugaacccaggagauggagguugcagugagcugagaucacgccacugcacuccagccugggcaacagagugagacucc

SEQ ID NO: 6629 - RNA, 88 nt, Homo Sapiens
ggagaaucgcuugaacccaggaggcagagguugcagugagccaagaucaugccacugcacuccagccugggcaacagagugagacucc

SEQ ID NO: 6630 - RNA, 88 nt, Homo Sapiens
ggagaaucgcuugaacccaggaggcggagguugcagugagcugagauugcacuauugcacuccagucugggugacagagugagacucc

SEQ ID NO: 6631 - RNA, 95 nt, Homo Sapiens
ggagaaucgcuugaacccaggagguggagagguugcagggagccgagaucacacacaccacugcacuccagccugggcaacaagagcaaaacucc

SEQ ID NO: 6632 - RNA, 89 nt, Homo Sapiens
ggagaaucgcuugaacccaggagguggaggcuguggugagcugagauugcgccauugcacuccagccugggcaacaagagcgaaacucc

SEQ ID NO: 6633 - RNA, 89 nt, Homo Sapiens
ggagaaucgcuugaacccaggagguggagguugcagugagccgagaucgcgccauugcacuccagccugggcaacaagagcagaacucc

SEQ ID NO: 6634 - RNA, 88 nt, Homo Sapiens
ggagaaucgcuugaacccaggagguggagguugcagugagcugaggucacaccacugcacuccagccugggcaacagagcgagacucc

SEQ ID NO: 6635 - RNA, 88 nt, Homo Sapiens; identical to SEQ ID NO: 6634

SEQ ID NO: 6636 - RNA, 88 nt, Homo Sapiens; identical to SEQ ID NO: 6634

SEQ ID NO: 6637 - RNA, 88 nt, Homo Sapiens; identical to SEQ ID NO: 6634

SEQ ID NO: 6638 - RNA, 88 nt, Homo Sapiens; identical to SEQ ID NO: 6634

SEQ ID NO: 6639 - RNA, 88 nt, Homo Sapiens
ggagaaucgcuugaacccaggagguggagguuguggcgagcugagaucaugccacugcacuccagccugggcaacagagugagacucc

SEQ ID NO: 6640 - RNA, 88 nt, Homo Sapiens
ggagaaucgcuugaacccaggagguggagguuguggugagccaagaucgugacauugcacuccagccugggcaacagagcgagauucc

SEQ ID NO: 6641 - RNA, 88 nt, Homo Sapiens
ggagaaucgcuugaacccagguggcaaggcuugcagugagcugagaucgcacuacugcacuccagccugggcaacagagcgagacucc

SEQ ID NO: 6642 - RNA, 88 nt, Homo Sapiens
ggagaaucgcuugaacccgagagguggagguugcagugagccaagaucacaucacugcacuccagccugggugacagagcaagacucc

SEQ ID NO: 6643 - RNA, 88 nt, Homo Sapiens
ggagaaucgcuugaacccggcaggcagaaguugcagugagccgagaucacgccauugcacuucagccugggugacagagggggacucc

SEQ ID NO: 6644 - RNA, 89 nt, Homo Sapiens
ggagaaucgcuugaacccgggaaguggagguugcagugagccgagaucuugccauuguucuccagccugggcgacaagagugaaacucc

SEQ ID NO: 6645 - RNA, 89 nt, Homo Sapiens
ggagaaucgcuugaacccgggagccggagguugcagugagucgagaucaugccacugcacuccagccugggcaacaagagugagacucc

SEQ ID NO: 6646 - RNA, 89 nt, Homo Sapiens
ggagaaucgcuugaacccgggaggcagagguugcagugagaugagaucacaccacugcacuccagccugggcaacaagagcgaaacucc

SEQ ID NO: 6647 - RNA, 88 nt, Homo Sapiens
ggagaaucgcuugaacccgggaggcagagguugcagugagccgagaucgcacuacugcacuccagccugggcaacagagugagacucc

SEQ ID NO: 6648 - RNA, 88 nt, Homo Sapiens; identical to SEQ ID NO: 6647

SEQ ID NO: 6649 - RNA, 90 nt, Homo Sapiens
ggagaaucgcuugaacccgggaggcggaggugguggugagccgagauugugccacugcacuccagccugggcaacaagagcaaaaacucc

SEQ ID NO: 6650 - RNA, 89 nt, Homo Sapiens
ggagaaucgcuugaacccgggaggcggagguuguggugagccaagauugcgccauugcacuccagccugggcaacaacagcgaaacucu

SEQ ID NO: 6651 - RNA, 88 nt, Homo Sapiens
ggagaaucgcuugaacccgggagguggagguuacggugagugagaucgcgccauugcacuccagccugggcaacaagagcgaaacucc

SEQ ID NO: 6652 - RNA, 91 nt, Homo Sapiens
ggagaaucgcuugaacccgggggguggagguaguggugagccgagcuugcacaccauugcacuccagccugggcaacaagagagaaacucc

SEQ ID NO: 6653 - RNA, 89 nt, Homo Sapiens
ggagaaucgcuugaacccuggaggcagagguugcggugagccaagaucgugccauugcacuccagccugggcaacaagagugaaacucc

SEQ ID NO: 6654 - RNA, 89 nt, Homo Sapiens
ggagaaucgcuugaaccugagaggcggagguugcggggagccaagaucgcaccauugcacuccagccugggcaacaagagcgaaacucc

SEQ ID NO: 6655 - RNA, 89 nt, Homo Sapiens
ggagaaucgcuugaaccugggaggcggagguugcggugagccgagaucgcgccauugcacuccagccugggcaacaaaaccgaaacucc

SEQ ID NO: 6656 - RNA, 88 nt, Homo Sapiens
ggagaaucgcuugaaccugggagguggagguuguggugagcugagauugugccacugcacuccagccugggcaacagaucgagacucc

SEQ ID NO: 6657 - RNA, 89 nt, Homo Sapiens
ggagaaucgcuugaaccuggggggcggacguugcagugagccaagaucgcaccauugcacuccagccugggcaacaagagcaaaucucc

SEQ ID NO: 6658 - RNA, 87 nt, Homo Sapiens
ggagaaucgcuugaacucgggaggggaggcugcagugagccaagaucacacaccacugcacuccagccugggcaacaaagugagacc

SEQ ID NO: 6659 - RNA, 87 nt, Homo Sapiens; identical to SEQ ID NO: 6658

SEQ ID NO: 6660 - RNA, 87 nt, Homo Sapiens; identical to SEQ ID NO: 6658

SEQ ID NO: 6661 - RNA, 87 nt, Homo Sapiens; identical to SEQ ID NO: 6658

SEQ ID NO: 6662 - RNA, 87 nt, Homo Sapiens; identical to SEQ ID NO: 6658

SEQ ID NO: 6663 - RNA, 88 nt, Homo Sapiens
ggagaaucgcuugaacucgggaggggaggcugcagugagccaagaucacacaccacugcacuccagccugggcaacaaagugagaccc

SEQ ID NO: 6664 - RNA, 81 nt, Homo Sapiens
ggagaaucgcuugaaucagggaguuggagguugcagugagcugaggucaccugcauuccagccugcugacagcgagacucc

SEQ ID NO: 6665 - RNA, 82 nt, Homo Sapiens
ggagaaucgcuugaauccaggagguugcagugagcugagaucacgccacugcacuccagccugggugacagagcaagacucc

SEQ ID NO: 6666 - RNA, 85 nt, Homo Sapiens
ggagaaucgcuugaaucugggaggcggagguugcagugagcugagaucgcaccacugcacuccagccuguugacagcgagauucc

SEQ ID NO: 6667 - RNA, 89 nt, Homo Sapiens
ggagaaucucuugaacccgggagguggagguuggggugagccgagaccgcgccauugcacuccagccugggcaacaagagugagacucc

SEQ ID NO: 6668 - RNA, 88 nt, Homo Sapiens
ggagaauggcaugaacccgggagguggagcuugcagugagcagagaucacgccacugcacuccagccugggcaacagagcgagacucc

SEQ ID NO: 6669 - RNA, 88 nt, Homo Sapiens; identical to SEQ ID NO: 6668

SEQ ID NO: 6670 - RNA, 88 nt, Homo Sapiens
ggagaauggcaugaaccugggagguggagcuugcagugagcccagauugcaacacugcacuccagccugggcaacagagccagacucu

SEQ ID NO: 6671 - RNA, 88 nt, Homo Sapiens
ggagaauggcgugaacccaggagguggagcuugcagugagccgagaucgcgccacugcacuccagccugggcaacagagcaagacucc

SEQ ID NO: 6672 - RNA, 88 nt, Homo Sapiens
ggagaauggcgugaacccgggaggcggagguugcagugagccgagauugugccacugcacuccagccugggcaacagagcgagacucc

SEQ ID NO: 6673 - RNA, 89 nt, Homo Sapiens
ggagaaugggccugaacccgggaggcggacguugcagugagccgagauugcaccacugcacuccagccugggcaacagagcgagacucc

SEQ ID NO: 6674 - RNA, 72 nt, Homo Sapiens
ggagaauugccugaacccagcaggcagagguugcaccacugcacuccagccugggcaacagagcaagacucc

SEQ ID NO: 6675 - RNA, 88 nt, Homo Sapiens
ggagaauugccugaacucaggaagcggaggucgcaguaagcugagaucaugccacugcacuccagccugggcaacagagcgagacucu

SEQ ID NO: 6676 - RNA, 88 nt, Homo Sapiens
ggagaauugcuugaacccaagagguggaggcugcagugagcugagaucaugccacugcacuccagccugggcaacagagcaagacucc

SEQ ID NO: 6677 - RNA, 88 nt, Homo Sapiens
ggagaauugcuugaacccaagagguggagguugcagugagccacgauugugccauugcacuccagccugggugacagagugagacucc

SEQ ID NO: 6678 - RNA, 88 nt, Homo Sapiens; identical to SEQ ID NO: 6677

SEQ ID NO: 6679 - RNA, 88 nt, Homo Sapiens; identical to SEQ ID NO: 6677

SEQ ID NO: 6680 - RNA, 88 nt, Homo Sapiens; identical to SEQ ID NO: 6677

SEQ ID NO: 6681 - RNA, 87 nt, Homo Sapiens
ggagaauugcuugaacccaggaagcagagguugcggugagcugaaucaugccacugcacuccagccugggcaacagagcagcacuuc

SEQ ID NO: 6682 - RNA, 89 nt, Homo Sapiens
ggagaauugcuugaacccaggacguggagguugccaugagcugagaucacgccauugcacuccagccugggcaacaagagcgaaacucc

SEQ ID NO: 6683 - RNA, 88 nt, Homo Sapiens
ggagaauugcuugaacccaggaggcagaagcugcagugagccaagauagugccacugcacuccagccugggcaacagagcgagacucc

SEQ ID NO: 6684 - RNA, 88 nt, Homo Sapiens
ggagaauugcuugaacccaggaggcggagguugcagugagccgagauagcaccacugcacuccagccugggcaacagagugagacucc

SEQ ID NO: 6685 - RNA, 89 nt, Homo Sapiens
ggagaauugcuugaacccaggagguggagguugcagugagccgagauugagccacugcacuccagccugggcaacaagagcaaaacucc

SEQ ID NO: 6686 - RNA, 88 nt, Homo Sapiens
ggagaauugcuugaacccaggagguggagguuucagugagccaagauuguaccacugcacuccagccugggcaacagagcgagacucc

SEQ ID NO: 6687 - RNA, 83 nt, Homo Sapiens
ggagaauugcuugaacccaggagguugcagugagccgagguugcgccauugcacuccagccugggcaacaagagcgaaacucc

SEQ ID NO: 6688 - RNA, 87 nt, Homo Sapiens
ggagaauugcuugaacccgggagguggagguugcagugagccgagaucgcccacugcacuccagccugggcaacagagcaagacucu

SEQ ID NO: 6689 - RNA, 88 nt, Homo Sapiens
ggagaauugcuugaacccgggagguggagguugcagugagccgagaucgcgccauugcacuccagccugggcaacagagcaagacucu

SEQ ID NO: 6690 - RNA, 89 nt, Homo Sapiens
ggagaauugcuugaacccggguggcggagguuguggugagugaagauugcacuauugcacuccagccugggcaacaagagugaaacucc

SEQ ID NO: 6691 - RNA, 88 nt, Homo Sapiens
ggagaauugcuugaacccuggaggcagagguugcagugagccgagaucgugccacugcacuccagccugggcaacagugcgagacucc

SEQ ID NO: 6692 - RNA, 86 nt, Homo Sapiens
ggagaauugcuugaaccuggaggcggagguugcagugagccgagauugugccacugcacuccagcccggcaacagagcaagacucc

SEQ ID NO: 6693 - RNA, 87 nt, Homo Sapiens
ggagaauugcuugaaccugggaaguggagguugcagugagccgagacugagcacugcacuccagccugggcaacagagugagacucu

SEQ ID NO: 6694 - RNA, 88 nt, Homo Sapiens
ggagaauugcuugaaccugggaggcagagguugcagugagcugagaucacgccauugcacuccagccugggcaacagagcgagaaucc

SEQ ID NO: 6695 - RNA, 88 nt, Homo Sapiens
ggagaauugcuugaaccugggaggcagugguugcagugagccgagauugugccacugcacuccacccucagcaacagagcaaaacucc

SEQ ID NO: 6696 - RNA, 88 nt, Homo Sapiens
ggagaauugcuugaaccugggaggugaagguugcagugagcugagaccaugccacugcacuccagccugggcaacagagcaaaacucc

SEQ ID NO: 6697 - RNA, 88 nt, Homo Sapiens
ggagaauugcuugaacgccggggucggagguugcagugagccaugaucgcgccacugcacuccagccugggcaacagagcgagacucu

SEQ ID NO: 6698 - RNA, 88 nt, Homo Sapiens
ggagaauugcuugaacucaggaggcggaaguugcagugagcugagaucgcaccacugcacuccagccugggcaacagagugagacucc

SEQ ID NO: 6699 - RNA, 88 nt, Homo Sapiens
ggagaauugcuugaacucgggaggcggauguugcagugagccaauaucgcaccacugcacuccagccugggcaacagagcaagacucc

SEQ ID NO: 6700 - RNA, 88 nt, Homo Sapiens
ggagaauugcuugaauccaggaggcagagguugcagugagcugagaucaugccacugcacuccagccugggugacagagugacacucc

SEQ ID NO: 6701 - RNA, 88 nt, Homo Sapiens
ggagaauugcuugcacccaggaggcagagguuguggugagcugagaucgucccauugcacuccagccugggugacagggcgaaacucc

SEQ ID NO: 6702 - RNA, 89 nt, Homo Sapiens
ggagaauuguuugaacccacauggcggagacugcggugagcugauaccgcgucauugcacuccagccugggcaacaagagcaaaacucc

SEQ ID NO: 6703 - RNA, 88 nt, Homo Sapiens
ggagaauuucuugaacccaggagguggagguugcagugagccgagauugcgccacugcacuccagccugggcaacagaacaagacucc

SEQ ID NO: 6704 - RNA, 112 nt, Homo Sapiens
ggagacaugauguagcagaugaugggacugucuuacauaacuggaucuuuuagaacuaucgaagauuaaguaguaaaaugguauaaaaaguuucuugacaauguuauuuucc

SEQ ID NO: 6705 - RNA, 98 nt, Homo Sapiens
ggagacccaggacccgggagagagguagaggggagcagagacagccaccagcuucuaucuucugcucuaagcacauucuuucacgaguuuaaguuucc

SEQ ID NO: 6706 - RNA, 106 nt, Homo Sapiens
ggagacgaacacauacacagaagauucagacacacuugcaauguauugcuggggauucuccagcauuggcaugauggagaggguggagaaucauuugaccgccucc

SEQ ID NO: 6707 - RNA, 103 nt, Homo Sapiens
ggagaggcauugugagggagagaggugucaggaaugaaagaaugucuuaaaauucuaagcagucuuucuucuucuucucuuuauuaacagcaauuaacucucu

SEQ ID NO: 6708 - RNA, 97 nt, Homo Sapiens
ggagaugguuuccaguucaccgucaacccaaaagcucucuucaggucauggcaaacagaccagggcuguggguguggcugugcuuggcacugacucc

SEQ ID NO: 6709 - RNA, 103 nt, Homo Sapiens
ggaggaccuggccaaaguggguggugcagggguggucuuaggagggcuuuccugaaggaguggccaggguucacccaucuuuccacccacggacccauccucu

SEQ ID NO: 6710 - RNA, 90 nt, Homo Sapiens
ggaggaucacgugagcccaggaggugaaggcuacagugaagugagaucaugcaacuguacuucagccugggcaacagagcaagauucucu

SEQ ID NO: 6711 - RNA, 88 nt, Homo Sapiens
ggaggaucacuugaaccugggagauggaggucucagugagcugagauugcgucacugcacuccagccugggcaacaaaaugagacucc

SEQ ID NO: 6712 - RNA, 107 nt, Homo Sapiens
ggaggcugagaugggagguucacuugaacccaggagguggaggcuguggugagccaacauccugccacugcacuccagccugggcaacagagccaaacucugacucc

SEQ ID NO: 6713 - RNA, 86 nt, Homo Sapiens
ggaggggaggauacaagaggaaugauaaauggcaaggaaaaccacucacucuuaaugcuuuuugucauacucauguccucuugucc

SEQ ID NO: 6714 - RNA, 81 nt, Homo Sapiens
ggaggggccaggaggaaaugaugagucuuagugaucuggaaacauuccagacuaauuuauuaucuucucuuuuuucccuuc

SEQ ID NO: 6715 - RNA, 56 nt, Homo Sapiens
ggaggugggaugugugugcuacuggcaucuaguggcugcuaaacauccuacacugc

SEQ ID NO: 6716 - RNA, 88 nt, Homo Sapiens
ggaguaucgcuugaaccugcgaggcggagguugcagugagccgggaucgcaccacugcacuccagccugggcaacagagugagacucc

SEQ ID NO: 6717 - RNA, 105 nt, Homo Sapiens
ggauacauaguggucacuuccauuuaagauguuugcauuucagcacuuuuauaauucaaauauggugcugucccuugagacucuuguugagagccacauguaucu

SEQ ID NO: 6718 - RNA, 83 nt, Homo Sapiens
ggaucacuugagcccaggagguugaggcugcagugagccauguuccugccacugcacuccagccugggcaacagagugagacc

SEQ ID NO: 6719 - RNA, 83 nt, Homo Sapiens
ggaucgcuugagcccaggaguucgaggcugcagugagcugugaucacaccacugcacuccagccugggcaacagagcgagacc

SEQ ID NO: 6720 - RNA, 83 nt, Homo Sapiens
ggauggcuugaguccaggagguggagguugcagugaacagagauugugucacugcacucuagccugggcaacagagcgagacc

SEQ ID NO: 6721 - RNA, 95 nt, Homo Sapiens
ggaugguuuggggaagagaaugugcauggaucgcucagaacugacccagaggcaaugaguauuugugugccauguggauucucuccaaaaugucc

SEQ ID NO: 6722 - RNA, 103 nt, Homo Sapiens
ggauuagaugauggugacagcaguagcagcaggagcagguaacauucauuuagaguugagaugugccacacccugcucuaaaugcuuuauggauaucaagucc

SEQ ID NO: 6723 - RNA, 85 nt, Homo Sapiens
ggauuaguucuggagagagcagguugcuaagaagaaucuggcuucuucagucagcgcucuugcuuccuaucucuccaugugaucu

SEQ ID NO: 6724 - RNA, 64 nt, Homo Sapiens
ggauuuggcaaagaaggcaguacaguuaauccuggcugcaacugcuggaaaauuugcuacaccc

SEQ ID NO: 6725 - RNA, 131 nt, Homo Sapiens
ggcaagauccucgcuccaaccguggcccguguucucuccuuuuguccccauagugugacuccgccaggaacuuggaauggcugaagacugugaaugagagucaugggucuguggaacgcucaucccugacc

SEQ ID NO: 6726 - RNA, 106 nt, Homo Sapiens
ggcacuuggaaccgucuuggggaauauagcuugguaauugaacugcuuaagcuuauuauuaauauuuaagcuauaguuccaggcccauuccagaggucccccagcc

SEQ ID NO: 6727 - RNA, 81 nt, Homo Sapiens
ggcagaauggaagugauuucuccuaaugaaaaugaagugcucuuuugaguauuucuuguuuuauugagauuccuaucugcc

SEQ ID NO: 6728 - RNA, 89 nt, Homo Sapiens
ggcagagcgcugccucucugcaggccgugugcuuugcucgguugaucuugcagagccuaagacacaggcccagagaggcagugaucgcc

SEQ ID NO: 6729 - RNA, 103 nt, Homo Sapiens
ggcagaggagggcucacuuuucaaaguuccaaauagggcaaaauguguguuucccuaggaaguauuuuuuaaaaacauuuuugagauagagucuugcucuguc

SEQ ID NO: 6730 - RNA, 90 nt, Homo Sapiens
ggcaggaaaauuccuucaccugggagguggagguugcagugagccaagauugcaccacuacacuccuaggcaauggagugagaccuuguc

SEQ ID NO: 6731 - RNA, 93 nt, Homo Sapiens
ggcaggagaaucaccugaacccggguggcagagguugcagggaggcgagaucgugccacugcacuccagccugggcaacagagugagacuguc

SEQ ID NO: 6732 - RNA, 96 nt, Homo Sapiens
ggcaggagaaucacuugaacccaggaggcagagguugcagugagccaagaucaugccacugcacuccagccugggcaacaagaaugaaacucuguc

SEQ ID NO: 6733 - RNA, 96 nt, Homo Sapiens
ggcaggagaaucgcuugaacccgggaggcggagguuguggugagccaagauugcgccauugcacuccagccugggcaacaacagcgaaacucuguc

SEQ ID NO: 6734 - RNA, 95 nt, Homo Sapiens
ggcaggagaaucgcuugaaccugggagacagagguugcagugagccaagaucgugucacugcacuccagccugggcaacagagugagacucuguc

SEQ ID NO: 6735 - RNA, 103 nt, Homo Sapiens
ggcaggagaauugcuugaacacaggaggcagagauugcagugagucaagaucaugccacugcacuccagcacuccagccuaagugacagagcaagauccuguu

SEQ ID NO: 6736 - RNA, 95 nt, Homo Sapiens
ggcaggagaauugcuugaaccugggagguggagguugcagugagccgagaucgcaccacugcacuccagccugggcaacagagugaggcucuguc

SEQ ID NO: 6737 - RNA, 130 nt, Homo Sapiens
ggcagggaggugacgagguaggggcagagcggauggaagccggagaucccagguucccggaauacuccggcuggggccuucgggcuucuccuguccccucccuacccccgugccucggguuucucccucc

SEQ ID NO: 6738 - RNA, 79 nt, Homo Sapiens
ggcaucuguaaucccagcuacucgggaggcugaggcacgagaauugcuugagccugggagguggagauugcagugaguc

SEQ ID NO: 6739 - RNA, 95 nt, Homo Sapiens
ggcaugagaaucgcuugaacccgggaggcggaggcugcagugagccaagaucgugccacugcacuccagccugggcaaccgagugagacucuguc

SEQ ID NO: 6740 - RNA, 65 nt, Homo Sapiens
ggcauggcagagccuugauuuguaauguuugcuaauuuacgugguacaagugcuccaguacggcc

SEQ ID NO: 6741 - RNA, 82 nt, Homo Sapiens
ggcaugguggugcucugauagcccuagcuacucaggaggcugagccuaguaguuagaggcugcagugaacuaugauugugcc

SEQ ID NO: 6742 - RNA, 90 nt, Homo Sapiens
ggcauuagauucucauaaggagcacacaaccuagauugcuagcaggcacaguucacaauaggguucguucuccugugagaauggcaugcc

SEQ ID NO: 6743 - RNA, 108 nt, Homo Sapiens
ggcauuagguuucagucacagccaagcaaguguggacagugaguaaugucugaagauuccauagcuugaucacagcuacuuuuguccugcugucugaacuccauuguc

SEQ ID NO: 6744 - RNA, 78 nt, Homo Sapiens
ggccaccugcugccuauucccuggcacuucauucuucugauaauggaguaugagagagaaugggacaugagguggacc

SEQ ID NO: 6745 - RNA, 81 nt, Homo Sapiens
ggccacuuccaccuuccagggcauaggugaccccuguggaaaacaaguaccccuggaacauccuagaaguggagguggacc

SEQ ID NO: 6746 - RNA, 85 nt, Homo Sapiens
ggccaggacucuugcagaacugagaccugggagcuccucccucaccaggaagggacccgaggcaggcggcgggggucucugagcc

SEQ ID NO: 6747 - RNA, 82 nt, Homo Sapiens
ggccaugccuuugucacccuaaauacugcacggccaugccuuugucaggcaggcugagugacugggaguuaggaggguggcc

SEQ ID NO: 6748 - RNA, 113 nt, Homo Sapiens
ggcccagcguggcuccugaccuggaggauaacaaugauaauggaagugcuguuaaaaguaagaaugacuaugaguuauugaguuuuucaucugcucaggcaccgugcugggcc

SEQ ID NO: 6749 - RNA, 79 nt, Homo Sapiens
ggccucccaaagugcugagauuacaggcaugagccacugcaccuggcccuugccucuauuucaaagcuacuuuggugcc

SEQ ID NO: 6750 - RNA, 114 nt, Homo Sapiens
ggccuccucccagcgucacggaaugcuguccugaucccuagcauuuacucacaugcugugcuuagugcuugaccaugugguggcagauucugugauguguaagacgugguugcc

SEQ ID NO: 6751 - RNA, 86 nt, Homo Sapiens
ggccuucucucugaguuaagcaaagagaggaagaauggcaaauaguuugagucuucccaaaucuuuuuagcauuugagaaaaggcu

SEQ ID NO: 6752 - RNA, 93 nt, Homo Sapiens
ggcgcuggugucaaacaguuaugugaugcuuugaagcacccucacuguagaugagagugucuugcacugcaaacauagccgaucacccgugcc

SEQ ID NO: 6753 - RNA, 95 nt, Homo Sapiens
ggcgggagaauugcuugaacccgggagguggagguugcagugagccgagaucgcgccauugcacuccagccugggcaacagagcaagacucuguc

SEQ ID NO: 6754 - RNA, 96 nt, Homo Sapiens
ggcguaucagguuucagaggaugcggcugggaacgggaguagaggugaggggucguugcaucugucgcgguguguaucuuuuggggguucagcgcc

SEQ ID NO: 6755 - RNA, 73 nt, Homo Sapiens
ggcgucacugcccugaugggcgguugggaaggcaaaaccugcccugaaaagccuuuggguagugauucuagcc

SEQ ID NO: 6756 - RNA, 91 nt, Homo Sapiens
ggcgucuugcucuauuggcaggcuggagugcaguggugcgaucucagcucacugcaacccccgccucccagauucaagcaauucuccugcc

SEQ ID NO: 6757 - RNA, 101 nt, Homo Sapiens
ggcgugagggaaagcaugaaaaauccaggauaaaaucaucaucagggaaacuccuaugaugcuggaacuggacaacaguguuuuagaucccuagucaugcc

SEQ ID NO: 6758 - RNA, 106 nt, Homo Sapiens
ggcuaagaguaacaggugcuggagccagacuuccuggguucauauccugguucuaccaauuuaccagcugugugaacuuaggaaaauuccucuccgccucuuaguu

SEQ ID NO: 6759 - RNA, 101 nt, Homo Sapiens
ggcuaagucaugagaauugcuugaacccaggcaucggagguugcagugagccgagauugcaccaaugcacuccagccugggcgacagagcgagacuccguc

SEQ ID NO: 6760 - RNA, 99 nt, Homo Sapiens
ggcuccggugguugcagucagauggcagcuggagguggagcaaccugaugucgugguuuugcauccacgacagcuucucucagacaagugauccuagcc

SEQ ID NO: 6761 - RNA, 77 nt, Homo Sapiens
ggcugagaccacccuugccugcccccuucuuucugccuuaagaauguccuuuuaggcugggcaugguggcucacgcc

SEQ ID NO: 6762 - RNA, 108 nt, Homo Sapiens
ggcugagggggaggaucacuugagcccaggaguucaaggcugcagugagccaugauugcgccacugcacuccagccugggcaacagagcaagacccugccccgccgcc

SEQ ID NO: 6763 - RNA, 80 nt, Homo Sapiens
ggcugaugugcucuguggcaucugucacagguuuuaauugaaggucagcaguggcagguaagccaccagcaucaucagcu

SEQ ID NO: 6764 - RNA, 90 nt, Homo Sapiens
ggcugggaacugugacucguacuuguaauccuagugcuuugagaggcugaggcaggaggauugcuugagaccaggaguuugagaccagcc

SEQ ID NO: 6765 - RNA, 88 nt, Homo Sapiens
ggcugggacugaggucauguucugucagguuccaaagagcgccaggaagacucugagaccacagagcacggccugcuuucucccagcc

SEQ ID NO: 6766 - RNA, 105 nt, Homo Sapiens
ggcuggggaaguuacuuaccuacuccgugucucaguuuuacuuaucucuaaaagggguagaguaacagcacucacuggaguggagugugguuaugccucccagcc

SEQ ID NO: 6767 - RNA, 84 nt, Homo Sapiens
ggcuguggcuggauucaaguaauccaggauaggcuguuuccaucugugaggccuauucuugauuacuuguuucuggaggcagcu

SEQ ID NO: 6768 - RNA, 92 nt, Homo Sapiens
ggcuuccccagucauauauucucagauucaaaggaacaaaguggccccagucagccuuucccagaaaccugugagugugguggcuggaagcc

SEQ ID NO: 6769 - RNA, 76 nt, Homo Sapiens
ggcuuccucaccaccuugugcacugcugcucccacaccacagugacuagcagcacauaaugguuugaauuaaagcu

SEQ ID NO: 6770 - RNA, 59 nt, Homo Sapiens
ggcuugggccgaccccagagagagcccaucaccuucuuuuugggguuuggggcuuggcc

SEQ ID NO: 6771 - RNA, 86 nt, Homo Sapiens
ggcuuuaggaaucgccuggcucuacccucucacuucauggcuacagauacuugugcccugagagagcaagugaauuucccaaagcc

SEQ ID NO: 6772 - RNA, 81 nt, Homo Sapiens
ggcuuuaucucuugccuugaccuccuacauuaucaacaaagugagaguuuaagaucuccugggcaggagauuucagaagcc

SEQ ID NO: 6773 - RNA, 76 nt, Homo Sapiens
gggaaagcagaagguuggggcuggaggucugcuggcaggcaggcagacauuuggagccaacuuuccugcucagccc

SEQ ID NO: 6774 - RNA, 77 nt, Homo Sapiens
gggaaaggcccaggagggggagaaaggcagacucagccagggaugggugaggguuucccugucccaaagcaagaccc

SEQ ID NO: 6775 - RNA, 106 nt, Homo Sapiens
gggaagaacuaccaaucuagggcacacgucucucugaauuguugauuaugcgcuuuaugaagagauuuuucaaucucgugugcuuuacuuugugugguuuagaccc

SEQ ID NO: 6776 - RNA, 78 nt, Homo Sapiens
gggaaggcaguagguuguauaguuaucuuccgaggggcaacaucacugcccugaaaccacacaaccuacuaccucacc

SEQ ID NO: 6777 - RNA, 90 nt, Homo Sapiens
gggacaaggcaaaugagagaggaaggccguagggaagggcuucucuccuaccucccacgucuuuaucuguccaaauccuugcuauuuccc

SEQ ID NO: 6778 - RNA, 101 nt, Homo Sapiens
gggacagcauccuuuuuuggcauuuguuuguugcggguggggagaggauugaacccuuaaccucaccucgcucgcaaguaucaagaaagggaaccugaccc

SEQ ID NO: 6779 - RNA, 129 nt, Homo Sapiens
gggacaucaaagaauaaauaagcugcucuaauugccaagaauucacaugugguuguaugcagcauuacugggaaauugaaguguaucugcaugugauucugcugugauggacacuuguaaguuuguucc

SEQ ID NO: 6780 - RNA, 84 nt, Homo Sapiens
gggaccguuagcugaaaugcuguugauuuuaguggcugugagcacacauaaggauacaggucauuucccuuauaauuagguccc

SEQ ID NO: 6781 - RNA, 77 nt, Homo Sapiens
gggacugcugucugcugucuacacuacacacuacuacacugcugucugcugugugugauaaggacacagauaguccu

SEQ ID NO: 6782 - RNA, 89 nt, Homo Sapiens
gggacuuaacugagaggaucugaguagcagacacccuaagagcaugucauugucuucucaccaguuacucuccaguuggcuagaguccc

SEQ ID NO: 6783 - RNA, 100 nt, Homo Sapiens
gggagacccaggacccgggagagagguagaggggagcagagacagccaccagcuucuaucuucugcucuaagcacauucuuucacgaguuuaaguuuccu

SEQ ID NO: 6784 - RNA, 88 nt, Homo Sapiens
gggagacuugcuugaacccaggaggcggagggugcagugagucgacaucaugccacugcacuccagccugggcaacagagcaagaccc

SEQ ID NO: 6785 - RNA, 105 nt, Homo Sapiens
gggagaggcauugugagggagagaggugucaggaaugaaagaaugucuuaaaauucuaagcagucuuucuucuucuucucuuuauuaacagcaauuaacucucuc

SEQ ID NO: 6786 - RNA, 96 nt, Homo Sapiens
gggagcaaguuuaggggucagguagugcuccucuuuuccccugaaaucacacaagaaugaggagggcuuucccugacuuugcaaagacucccuccc

SEQ ID NO: 6787 - RNA, 114 nt, Homo Sapiens
gggagcucuuuugcaaaacaaaagaugucuucuuuucccuuagcccuugguuuuguuuggcagaugguguaggugaagagaacauuaguuguggaagagguauguaugacuccc

SEQ ID NO: 6788 - RNA, 92 nt, Homo Sapiens
gggaggacugcuugagcccaggagguggagucuguagugagcugugauccugccacugcacuccagccugggcaacagagcaagacccugcc

SEQ ID NO: 6789 - RNA, 105 nt, Homo Sapiens
gggaggagagaaggaaccauagauucugagaaacacaccaggaugacuaggccuggaggaguccagggugggccucagacccucacuucuugucuggcaccuccc

SEQ ID NO: 6790 - RNA, 77 nt, Homo Sapiens
gggaggaggugaaggaacaaaugcugaacaccuguuauuuaugaagcacucuacauauguucuuucauuucacuccu

SEQ ID NO: 6791 - RNA, 90 nt, Homo Sapiens
gggaggaucgcuugagccuaggaggucaaggcugcagugagcugagaucacaccacugcacuccugccuaggugacaaagugagacuguc

SEQ ID NO: 6792 - RNA, 92 nt, Homo Sapiens
gggaggauugcuugagccuggaagcuggagccugcagugaacuaucauugugccacuguacuccagccuaggcaacaaaaugaaauccuguc

SEQ ID NO: 6793 - RNA, 82 nt, Homo Sapiens
gggaggccaaggugggaagauugcuugagcccuggagguugagacaagccugggcaacauagcaauaccccauuuguuucuu

SEQ ID NO: 6794 - RNA, 113 nt, Homo Sapiens
gggaggcugagggggaggaucacuugagcccaggaguucaaggcugcagugagccaugauugcgccacugcacuccagccugggcaacagagcaagacccugccccgccgccu

SEQ ID NO: 6795 - RNA, 92 nt, Homo Sapiens
gggaguccacggaagcgugagaauggaggaagaacagugcuuugagugacugcugcagggucuuccuauuauuuuuaguucugaggauucuc

SEQ ID NO: 6796 - RNA, 109 nt, Homo Sapiens
gggauagcucauuuuugaaaucaguuuagaacauuuaaaaugugggaaauucaaauaaaaaugcaaauuuucacuguuuucuaaaaagucagaucaacauugcuggccc

SEQ ID NO: 6797 - RNA, 90 nt, Homo Sapiens
gggaugccaaacccucucccuguguuacauuagugcuaugacugaacauaaacacugcuguaauggacggugagaucuucgugucauccu

SEQ ID NO: 6798 - RNA, 91 nt, Homo Sapiens
gggauggaaaaugcagacacaauauagcaaauagagggucuuuuccugucauggaaaucggucagcccugaugcuucugcauuucuuuccc

SEQ ID NO: 6799 - RNA, 101 nt, Homo Sapiens
gggauuacaggcaccugcugccaagucuggcuaauuuuuguauuuuuaauagagacgggguuucgcuauguuggccaggcuggucucgaacuccugaucuc

SEQ ID NO: 6800 - RNA, 93 nt, Homo Sapiens
gggcaguggcagagaaugaauguauguguggguuucucagccuugagguauaaggucuaaaggcucuggggauucacugcauacaccacuucc

SEQ ID NO: 6801 - RNA, 88 nt, Homo Sapiens
gggcauuuugccucugguagggauggccauggugccagcccuccugggccucauuggguaucaccuauacagaaaggccaauagaccc

SEQ ID NO: 6802 - RNA, 105 nt, Homo Sapiens
gggccaaaaauucaagaugcucauuugcaaguugucuucuaggguguugccugaaccuaggcugcaguagaaguggggcuuggagguaggcgauauugaaauccc

SEQ ID NO: 6803 - RNA, 96 nt, Homo Sapiens
gggcgaguccuuaaccuuggcaaaauaaacuucugaauuuauugagaccugucucagguacuuuuugguuuacaugugcuugugagggcaggcacc

SEQ ID NO: 6804 - RNA, 86 nt, Homo Sapiens
gggcgggggcccucgucuuacccagcaguguuugggugcgguugggagucucuaauacugccggguaaugauggaggccccugucc

SEQ ID NO: 6805 - RNA, 85 nt, Homo Sapiens
gggcugacuuggacucugaaauguuaagcaacuugcucuccaggaguccugugaagaaguugcuucauccuuuugaagucugccc

SEQ ID NO: 6806 - RNA, 93 nt, Homo Sapiens
gggcugggcaagauggcucauguuuguagucucaguacuuugggaggccaaagaugggaggauugcuugagcccgugaguuugagaccagccu

SEQ ID NO: 6807 - RNA, 81 nt, Homo Sapiens
gggcuugcuggguuuacagauggcaaagaucuggcaaauuaaaaauagccuuaggccaaagaucaaacccaaggugggcuu

SEQ ID NO: 6808 - RNA, 82 nt, Homo Sapiens
gggcuuuugcccuagauggacaaguucaaauccuggcucagucacuuaggaaauuuggcuguuugucuugggcaaguugcuc

SEQ ID NO: 6809 - RNA, 106 nt, Homo Sapiens
ggggacauaaccguagguggccgugccaacaggaaaccccaggaagucuggcuucagagccauucccuuuagcucugauggcacacugucuuguaguucagucuuc

SEQ ID NO: 6810 - RNA, 126 nt, Homo Sapiens
ggggaugugacuccugauaugaaauccauugccaaggcugaccuuaucgucacuacgccagagaagugggauggagucagcagaagcuggcaaaauaggaacuauguucagcaagucacuauucuc

SEQ ID NO: 6811 - RNA, 88 nt, Homo Sapiens
ggggcagagcggauggaagccggagaucccagguucccggaauacuccggcuggggccuucgggcuucuccuguccccucccuacccc

SEQ ID NO: 6812 - RNA, 91 nt, Homo Sapiens
ggggccucaaguuacgacuucucaaggcagugacaucuuccucaauugguaugaguagcugccaggcaacaaguacguauaagaguguccc

SEQ ID NO: 6813 - RNA, 89 nt, Homo Sapiens
ggggcuucgccacugauuguccaaacgcaauucuuguacgagucugcggccaaccgagaauuguggcuggacaucuguggcugagcucc

SEQ ID NO: 6814 - RNA, 88 nt, Homo Sapiens
ggggcuucuucccuggcaggauuccugggauuucaaacuaccucaccaacaggacgcugaaccaggagccugccacccaacuggcccc

SEQ ID NO: 6815 - RNA, 87 nt, Homo Sapiens
gggggacagagcgagacuccaucuuuucugggagacuccauugggagacugucuuuuuugggagacggagucgugccuuaguuuccc

SEQ ID NO: 6816 - RNA, 96 nt, Homo Sapiens
gggggaggaucacuugagcccaggaguucaaggcugcagugagccaugauugcgccacugcacuccagccugggcaacagagcaagacccugcccc

SEQ ID NO: 6817 - RNA, 78 nt, Homo Sapiens
gggggccacauucucugggcauucagaagccaggauuucauaggccaugaaaucugcugucuuuuagaagugggcucc

SEQ ID NO: 6818 - RNA, 82 nt, Homo Sapiens
gggguauaggcacugagaagcaaacaggauucaucugagaacaucgguugcaugucucugugcuucaguguucaagucuccc

SEQ ID NO: 6819 - RNA, 82 nt, Homo Sapiens
gggguuguccuuaaguucccucugccugcaguccugcuuuguuuuggacaaguaggagugacaagcaggucagcacagcccu

SEQ ID NO: 6820 - RNA, 114 nt, Homo Sapiens
ggguaccagaugugcuuccuguccucaguaaagaacuuggaguauguuguuccucaaauaucuuuugaugaaugggugcuccaggaguuucuacugacaggcuacauuuuaucc

SEQ ID NO: 6821 - RNA, 86 nt, Homo Sapiens
gggucacuguaugguaccagugucagcuuccuguguuacacgagauggcacaguugggugaagcuggugaugaagguaugugaccc

SEQ ID NO: 6822 - RNA, 115 nt, Homo Sapiens
gggugcauggacuaggacccuggaggcagaaauaguuaccgaggggaaguuacaggccugagugugagucccuguuugguugcugaugagcuuugagguccuuggccagacacuc

SEQ ID NO: 6823 - RNA, 95 nt, Homo Sapiens
gggugccuggaagcuacugcuucuucuagucaaauggaaaucuuucaaugaugccagguggugcuguuaagaagcagaauucuuccccuaagccc

SEQ ID NO: 6824 - RNA, 90 nt, Homo Sapiens
gggugugaaggaaacauccucccccuuguuuucaaccuaguaggccaguuuagaaacaagccacagggaagguguugucagucauuacuc

SEQ ID NO: 6825 - RNA, 112 nt, Homo Sapiens
gggugugguggagcacgccuguuaucccagcuacucaggaggcugaggugggagaaucaccugagcccgggagguagagguugcagugaguggagaucgugucaccacacuc

SEQ ID NO: 6826 - RNA, 65 nt, Homo Sapiens
ggguucuuuuuccgcuuucugagcccuuuuauaccuuacguuuagaaggggaaaaucauccuccc

SEQ ID NO: 6827 - RNA, 80 nt, Homo Sapiens
ggguuguccuuaaguucccucugccugcaguccugcuuuguuuuggacaaguaggagugacaagcaggucagcacagccc

SEQ ID NO: 6828 - RNA, 74 nt, Homo Sapiens
ggguuguuacaugcaugaugcugagguuugggaauauggauggucccaucacccaggugauguauguaguaccc

SEQ ID NO: 6829 - RNA, 103 nt, Homo Sapiens
gguaagauugguggccaccacauucagucuccuucacagcuaaguguagccacauaacuaugcuuuggccacggggauaugaaugcuacuacuaauuuuuucc

SEQ ID NO: 6830 - RNA, 99 nt, Homo Sapiens
gguacaugucacuacuguucauagucucuuugcuggaacuugguccuauggcccuacuggcagagaggaaggcuaugaaacccagucuaggccugcgcc

SEQ ID NO: 6831 - RNA, 97 nt, Homo Sapiens
gguagguuuagaaugaggucugugucacugugguauuacgauauuuugacugguuauuauaaccacagugucacagaguccaucaaaaacccaugcc

SEQ ID NO: 6832 - RNA, 114 nt, Homo Sapiens
gguaguggugauucaaagcaagaugguagcauuggagaggaugagauauggucagaugaggauauauuuuaaaaguugagcuaacaggauuugcugaggaaucagaagugaacc

SEQ ID NO: 6833 - RNA, 69 nt, Homo Sapiens
gguauacuuacuagcauauuauauagcucuaagaguguagaguuauaugaugugcuagugaaguguauu

SEQ ID NO: 6834 - RNA, 86 nt, Homo Sapiens
gguauugggagaaaaguguguuaucuagguaguccaggaaggucuuccuuucaugacaauacccauagacacuuagucccuugacu

SEQ ID NO: 6835 - RNA, 95 nt, Homo Sapiens
ggucagugcuuuaagugaaucuacucagagcugugaaaucuugggggaauuugacccagucacaguugagagaagguucuggaaggauaugggcu

SEQ ID NO: 6836 - RNA, 80 nt, Homo Sapiens
gguccagauguggccaugggagacugaggggcggacguguuccugggugcuuccuucaucucagucuccucacugagacc

SEQ ID NO: 6837 - RNA, 76 nt, Homo Sapiens
ggucgagguggguguaucgcuugagcccaggaguuugaguccagccugggcaacauagugagaccuugucuugacc

SEQ ID NO: 6838 - RNA, 101 nt, Homo Sapiens
ggucguuugcuuuucagugaccagguucuucauacacauggaugucucacagaucagcuaaggccuguguuugaacaccuuggucaccccugcaaggagcc

SEQ ID NO: 6839 - RNA, 106 nt, Homo Sapiens
ggucucccucuugcccaggcuggagugcagugaugcaaucauaguucacugcaaccuucuggguucaagugauuuuccugccucagccucccaaguaguugagacu

SEQ ID NO: 6840 - RNA, 130 nt, Homo Sapiens
ggucugugugaagcaucacuuugcagggauuacuaaugguggggcagcaggucugugaauuaaguuaucucuugaccucacccucaugucaacacaaauguaauuccuaaacaagaugcauugccagucu

SEQ ID NO: 6841 - RNA, 110 nt, Homo Sapiens
ggugaaacugcccuuuccuuucuguucuaugagugugaugguguuugagaaaauguggggcuaugguucaggcgcacuucacaugugcaaagauggagaaagcacucacc

SEQ ID NO: 6842 - RNA, 96 nt, Homo Sapiens
ggugacaagagucucacucugugguccagacuggaguauagugcuaucagagcuuacuacaacuuuaaacuucugggcucaggugauccucccacc

SEQ ID NO: 6843 - RNA, 79 nt, Homo Sapiens
ggugaggaaguguuauugucagggucucccuuucagaaggccuuggggccaaggggaggagcuggaauugccuuccacc

SEQ ID NO: 6844 - RNA, 98 nt, Homo Sapiens
ggugcaaacaccccguucauguaacacgggccugaggucagcaguagaggaccaguauugguuuuggccccagccucugcguggauggauugaacgcc

SEQ ID NO: 6845 - RNA, 71 nt, Homo Sapiens
gguggagcagaaaggcaggaguccugcucccuggcaccaucauggagcaugcccagcccagaucugccccc

SEQ ID NO: 6846 - RNA, 72 nt, Homo Sapiens
gguggagcagaaaggcaggaguccugcucccuggcaccaucauggagcaugcccagcccagaucugcccccc

SEQ ID NO: 6847 - RNA, 86 nt, Homo Sapiens
gguggcacuggcaggaugugccuccugaggugugucgaguguucucuacauggggcacuguggaggugucaucggcucaguucccc

SEQ ID NO: 6848 - RNA, 95 nt, Homo Sapiens
ggugggaggacugcuugagcccaggagguggagucuguagugagcugugauccugccacugcacuccagccugggcaacagagcaagacccugcc

SEQ ID NO: 6849 - RNA, 94 nt, Homo Sapiens
ggugguaaagcccuggagugaggcaggaaccccaaagcccuaugacaccccauauagguacccccaaaccugccuauacuucaggccaggcccc

SEQ ID NO: 6850 - RNA, 95 nt, Homo Sapiens
ggugguaaagcccuggagugaggcaggaaccccaaagcccuaugacaccccauauagguacccccaaaccugccuauacuucaggccaggccccc

SEQ ID NO: 6851 - RNA, 85 nt, Homo Sapiens
gguggugagaggggccuggggcgugguguggagggucgaguucuuugucgucccacagucacccccaggaccaccuugcgaagcc

SEQ ID NO: 6852 - RNA, 68 nt, Homo Sapiens
gguggugggugugaggaagggcugggcacuuucacugucuuuuccuucauaaacuggcaagcacuacc

SEQ ID NO: 6853 - RNA, 76 nt, Homo Sapiens
ggugguuauggugaugugcaccuguagucucaucugcuuuggaguugaggcugcagugaacuaugaucgugccacu

SEQ ID NO: 6854 - RNA, 120 nt, Homo Sapiens
ggugucugccugguugaucuugaaugauggcaagugggcacuuuucagguaacuauugaugauuaacugacaaagaucugugaaggcuacacuuugucacuucagagugccagagauacc

SEQ ID NO: 6855 - RNA, 92 nt, Homo Sapiens
gguucacacauuggugccuuugcugggacaaaaaagagacuuuccugaggguugucuuguuccaguuucucagccacucaccaugugauacc

SEQ ID NO: 6856 - RNA, 87 nt, Homo Sapiens
gguugccgugauugaggaggugcuaccagcgucugcugggcagagaccagggaugcugcuccacaucccacaaugcacaggacaauc

SEQ ID NO: 6857 - RNA, 73 nt, Homo Sapiens
gguuggaaugaggaaggguguggucuucggcuaaaauuugcauaaaacggaacccauccgggcgauuccaacu

SEQ ID NO: 6858 - RNA, 82 nt, Homo Sapiens
gguuuccuggaacuuugggggaucauuauaaaaauacuaggguaaaaaagcaaccuuaguaaucccagcaauuugggaggcc

SEQ ID NO: 6859 - RNA, 125 nt, Homo Sapiens
guaaaucucccugauaccaucacucuuaaaccuuuagaaaugcuacagcaucuagcuucucuagaucaauaaucacagaggcuuaagugcugaccucauaaagauaaagaguucccaugauuuac

SEQ ID NO: 6860 - RNA, 84 nt, Homo Sapiens
guagagaaccucaucaugagauuugagaauagcuuuagaguuacucuugggauagugucucauggcccugugagggaacucuac

SEQ ID NO: 6861 - RNA, 74 nt, Homo Sapiens
guagagauggaguuuuacuauguugcccagguugaucuugaacuccugggcucaagugauccucccaucuugac

SEQ ID NO: 6862 - RNA, 77 nt, Homo Sapiens
guagaggguaugccugggaaaacaggagucacagaagcuucugugacuguauuuucccaaagagguuuauuauuuau

SEQ ID NO: 6863 - RNA, 74 nt, Homo Sapiens
guagaggugggguuucuccauguuggucaggcuggucuuuaacuccugaccucaggugauacgcccgccuuggc

SEQ ID NO: 6864 - RNA, 89 nt, Homo Sapiens
guaggaggagucagggauuuucugguuugagagacaaugacacacaccccuaaguucaccuucucucgaauaguaggcccugcucuuac

SEQ ID NO: 6865 - RNA, 111 nt, Homo Sapiens
guaguccaccucauaaaaucagaaaguauuacuggucucccacuuuuaggcuauuaacgcuuguagugagaguuuguagguuucuugucgugguugccaggggcugggggc

SEQ ID NO: 6866 - RNA, 74 nt, Homo Sapiens
guagucccagcuauucaggagcuugaggugggaggaucacuucggcccaggagucugaggcuggagugagcuau

SEQ ID NO: 6867 - RNA, 108 nt, Homo Sapiens
guaguuaccauugccuuuucugugagcuauuuguuuugguuugcugaaacuaguccaaaacaggaaauuuaacagacagccacagccaaagagugucaugugaauuac

SEQ ID NO: 6868 - RNA, 90 nt, Homo Sapiens
guauaacgcaaaacacaauuucuaaauagucaaaaguuuuuccuggcaaggagacuuuuguagacaccuacccugugaucaucugugugc

SEQ ID NO: 6869 - RNA, 85 nt, Homo Sapiens
guauggggcaacuuggggcgugaugucagccagaguccuuccaccaaggcuuuuaugguguuacgugauccaccaccccauuaac

SEQ ID NO: 6870 - RNA, 90 nt, Homo Sapiens
gucagcaccgagguagcagagaauuaacauucuugucagcagagaaugaagcaggaauauaauuaaaacuuugcccuuggaauagcugau

SEQ ID NO: 6871 - RNA, 110 nt, Homo Sapiens
gucaggacuguuggcuaagggaaugucugcuuggacugaucauugaacaaucuuuccaacuaaaagcuucuaugauucucuaaguagcaaucagcaccgacaguuaugau

SEQ ID NO: 6872 - RNA, 87 nt, Homo Sapiens
gucaguccugauggcagcugugcagagugggggugaggaggccaacuuacugcuuccugaacugggcagugccuucuaugacauggc

SEQ ID NO: 6873 - RNA, 75 nt, Homo Sapiens
guccacacugaccuucugugucauggcauaugcccaugucaggcagugcugugcuaaaggaaggauuacauggac

SEQ ID NO: 6874 - RNA, 99 nt, Homo Sapiens
guccacugauauucacuagccuguuuguccucaccccugaagcagauaaacacauguagauggaggaaaagugacaggcagguggguucaucagugggc

SEQ ID NO: 6875 - RNA, 110 nt, Homo Sapiens
guccacuggcccuucuugucuuagguccucacacacagcucugcucaguucaaucacccagaaugcaggcugguuggugaggcaaauuuggacagaagaagucagugucc

SEQ ID NO: 6876 - RNA, 110 nt, Homo Sapiens
guccauccuuugaacaugacuccugguguguuagucuagucuguucucaugcugcuaauaaagacauaccugagacuggcuaauuuauaaaggaaagagguuuaauggac

SEQ ID NO: 6877 - RNA, 103 nt, Homo Sapiens
guccaucuucaguggcauugggccuuggcugggaugcugaguuauccacuggagcaucggcaguacaggcaggcacagaggcaguggauccaucggagguggc

SEQ ID NO: 6878 - RNA, 74 nt, Homo Sapiens
gucccaaagaaaaggaaaacccagcaagggcaugguccaucugcugccuuuucugggcucccuuuucugcugac

SEQ ID NO: 6879 - RNA, 91 nt, Homo Sapiens
guccccuuucucuuucuaccauacccccaguaaagcuacuuaaaauccucuguaggaaagagcugaguaauugggggcagagauggaggac

SEQ ID NO: 6880 - RNA, 87 nt, Homo Sapiens
gucccuaucacucggagcggagaccugagcuaugagucaucagugaggugcuauacucagagccauuccgcucaggucauggaggac

SEQ ID NO: 6881 - RNA, 74 nt, Homo Sapiens
guccuggaagacaugguagagcugaaggaucagccaacuuugagacucagcucuagcugccugucuccaguggc

SEQ ID NO: 6882 - RNA, 100 nt, Homo Sapiens
guccuguacugcucaauucagugaccacuagccauauguggcuacugagcacuugaaauguggcuaguuugaacugagaugugcucuaaguacacuggau

SEQ ID NO: 6883 - RNA, 112 nt, Homo Sapiens
guccuuuagucucuauuuuugcuccuaauuguuccugcagguaguagguuaacauguaacguacuuacagaaggaagcaauugaacauggcauagauacugaaagaaagggc

SEQ ID NO: 6884 - RNA, 93 nt, Homo Sapiens
gucuaaccagucccagugagaugaaccagguaucucagcuggaaaugcagaaaucaccugccuucucuguuggucucccugggagcugcagac

SEQ ID NO: 6885 - RNA, 130 nt, Homo Sapiens
gucuaggucugauaauuuucauucauuucuuucauggacauggugacucuuuucuugccauccuuaaggagaaaagccauggacacuacaaaaucuuugagguuugaagugggaacuaggagauucaggc

SEQ ID NO: 6886 - RNA, 88 nt, Homo Sapiens
gucuauuaugagucugacuggcacagacaucugucaaggaagaaggauucuuugagcguauuugugucagucaacugcauauauggac

SEQ ID NO: 6887 - RNA, 102 nt, Homo Sapiens
gucucucagagguagagugugucuauggaagggguugucaugguaacagcuucuguuggcuucuagcccuaccuuuucuggacacauucaugcuagagggau

SEQ ID NO: 6888 - RNA, 76 nt, Homo Sapiens
gucucuguugcccaggcuggagugcaguggcgcaaucucagcucacugcaaccuccaccuccuggguucaagcgau

SEQ ID NO: 6889 - RNA, 81 nt, Homo Sapiens
gucugaaauccaggugugggcagggccgugcucccuccgaaggcucuaggggaggauccuugcucaacuuauuuuugagac

SEQ ID NO: 6890 - RNA, 93 nt, Homo Sapiens
gucuggcauucccuagugagaugaacccgguaccucagauggaaaugcagaaaucacccaucuucugugucgcucaugcugggagcuguagac

SEQ ID NO: 6891 - RNA, 88 nt, Homo Sapiens
gucugucucuaguguuuuuccaaaugacauccagggcucuggccguggagucccugaugugaucgcuaaaggaccuccggagaggggc

SEQ ID NO: 6892 - RNA, 76 nt, Homo Sapiens
gucuucauaucuccagguucugcuggagcaauuaccucccccaucuggcuccuuaggaccuagagguaguaaaggc

SEQ ID NO: 6893 - RNA, 65 nt, Homo Sapiens
gugaacccgggagacggagcuugcagugagcugagaucgugccacugcacuccagccugggcaac

SEQ ID NO: 6894 - RNA, 83 nt, Homo Sapiens
gugacguagguuuguacgucaacucagccuuauucugggaaaucauuaauccuuaacucugaugacugugcaaaaguagucac

SEQ ID NO: 6895 - RNA, 113 nt, Homo Sapiens
gugacuccugauaugaaauccauugccaaggcugaccuuaucgucacuacgccagagaagugggauggagucagcagaagcuggcaaaauaggaacuauguucagcaagucac

SEQ ID NO: 6896 - RNA, 98 nt, Homo Sapiens
gugacuuuccaggugucacacagugaguggcauaaucagaguacaauuugagucaugcccauacaucacauugccagugauuacccaaggaaagugac

SEQ ID NO: 6897 - RNA, 79 nt, Homo Sapiens
gugagauguguuccaggaagucgucuugagcacccauugcucagaguuuauauuggacuugcuuucuagcacauaccac

SEQ ID NO: 6898 - RNA, 84 nt, Homo Sapiens
gugaggcucuggcaaggugugggcuagagaugcgacucaguuggaucuaucucucagaaggcuaccuuguaaguagaguuccac

SEQ ID NO: 6899 - RNA, 78 nt, Homo Sapiens
gugauccacacgcuggcccaggaguucgacauuuaccgcgaggugggcggagagccugugccugugacgagggaugau

SEQ ID NO: 6900 - RNA, 121 nt, Homo Sapiens
gugauucagccagacgugauggaggaaauggugguaucuuguguuauuaagcacuugaacuugguugaugcacugcagucucuaauaaauuuccaauaucaagaagaacaugcugaagaau

SEQ ID NO: 6901 - RNA, 102 nt, Homo Sapiens
gugcacuacagacuccagccucccuuugaagccagguuccagagcuuccucccuuuggccuggaaccucaacagcaggauugggaugaggauggaaguguac

SEQ ID NO: 6902 - RNA, 102 nt, Homo Sapiens; identical to SEQ ID NO: 6901

SEQ ID NO: 6903 - RNA, 83 nt, Homo Sapiens
gugcaguacaaagacaguucagugacaaguuccauccauaccauggaagaggguuaaacuuguggcuguuuuugccacagcau

SEQ ID NO: 6904 - RNA, 83 nt, Homo Sapiens
gugcauuucuauuucuaguuuuucacggaacugaccaggcaauucagucaguagcugucaaaacuggaguccagaacaggcac

SEQ ID NO: 6905 - RNA, 103 nt, Homo Sapiens
gugccuagccaagcagaugaaugagguagaacagucuuguucauacauugccauuauaucuagugcaguugaaugaacauuuucugugucugggcuuaggugc

SEQ ID NO: 6906 - RNA, 131 nt, Homo Sapiens
gugccucaucuguaggugguugagagaaugaaaggagguagcaugagcagggcacucagcucggaggcagugccuagccaacauugcuuaucuucacugugaauuuggcuuuuuuccuacucuugaaucuu

SEQ ID NO: 6907 - RNA, 87 nt, Homo Sapiens
gugcuagggggucaccuaugugggagccagcucugccuccugccccgaagcuccagagacuucuccuacaacugacucucuggacac

SEQ ID NO: 6908 - RNA, 104 nt, Homo Sapiens
gugcugggucaaacagccuuuauuuuagcaguugugagacccuagagaacuccuuugguguuuuggggucuccccagcaugcacaauggggguuaugcuagcau

SEQ ID NO: 6909 - RNA, 88 nt, Homo Sapiens
guggacuuaggagguagagagugcuuuggguguaggccagguaaguuucuggucugccugcauuaggcacuugguagcuguuagcuau

SEQ ID NO: 6910 - RNA, 97 nt, Homo Sapiens
guggacuuugauguguguguaggaaaauauuaaggugggauguguggaucaguguccuagcacauucccgcaggguguaagccuggcacuaucauac

SEQ ID NO: 6911 - RNA, 97 nt, Homo Sapiens; identical to SEQ ID NO: 6910

SEQ ID NO: 6912 - RNA, 101 nt, Homo Sapiens
guggcauagggugggccuuuaauccaaugugacugguguccauauaagagguggagaaauguagagacacagacacaugggagaaggccaugugauggcac

SEQ ID NO: 6913 - RNA, 66 nt, Homo Sapiens
guggcguuuauucccuuaguauguaggugacccaggguggcuuugcuuuggcaagggagaagucac

SEQ ID NO: 6914 - RNA, 77 nt, Homo Sapiens
guggcucgacucuugaccauggcugggguuccugaggaugagcuaaacccuuuccauguacuggggguugaggccac

SEQ ID NO: 6915 - RNA, 88 nt, Homo Sapiens
gugggaggaggacuggcaaaaauaugagaguaggaguuugggcucuugagcuugggccuggccuucaaauuuccacucuuucacucac

SEQ ID NO: 6916 - RNA, 112 nt, Homo Sapiens
guggguauucagagagagaagauaaugaauagggagugucagaaugccagcaucauuugccucaaaugccacuuguuacgugcuuccacucuuuuauucucucugaggacau

SEQ ID NO: 6917 - RNA, 74 nt, Homo Sapiens
guggguggugcagggguggucuuaggagggcuuuccugaaggaguggccaggguucacccaucuuuccacccac

SEQ ID NO: 6918 - RNA, 98 nt, Homo Sapiens
guggucauaagguccuuucuggcucuaauaaccugagcuucuguuaugaagcugggacccuuagagccucaggaugauccucuguuuguuugugaagc

SEQ ID NO: 6919 - RNA, 93 nt, Homo Sapiens
guggugcauaccuguaaucucagauacuugggagguugaggugguaggauugcuugagcucaggaguuugaggcugcaguaagcuaugaucac

SEQ ID NO: 6920 - RNA, 93 nt, Homo Sapiens
gugguguaugggaucugcauggagguggucuaugagaaagcaaaccccagugagugcugcuucgggauucucuccaacugcaaccaugccuac

SEQ ID NO: 6921 - RNA, 85 nt, Homo Sapiens
guguagcaugcaucaguacuucaccuacuguauggauauacuaugcuuuaaaaauccauucauuaggccaggugcgguggcucac

SEQ ID NO: 6922 - RNA, 87 nt, Homo Sapiens
guguagcaugcaucaguacuucaccuacuguauggauauacuaugcuuuaaaaauccauucauuaggccaggugcgguggcucacgc

SEQ ID NO: 6923 - RNA, 97 nt, Homo Sapiens
gugucccuuccaagcuguguuaacuguucaaacucaggccugugugacuccauuggggugagaggugaaagcauaacauggguacagaggggacaac

SEQ ID NO: 6924 - RNA, 93 nt, Homo Sapiens
gugucugguuuccaggaggcaggcgugcugucugaagaggcuuuggaaguaccccaaauaauucaguucuugaccugccccagggccacacac

SEQ ID NO: 6925 - RNA, 109 nt, Homo Sapiens
gugugaccuuggcccugugaggcuucaccucuugagccugagaagcagaggugacaguacuggcccugguucuuagcagggggguggcgggcaggguaggggguggcgc

SEQ ID NO: 6926 - RNA, 79 nt, Homo Sapiens
gugugacuuuagugcuacucugauuuuacuguucaggaaagugaagcagagagguucaaugucuuacucaaggucacac

SEQ ID NO: 6927 - RNA, 113 nt, Homo Sapiens
gugugauauagguggucugggaucauggcuggacaaacacaaugcaguaggaagagugcuggcucuuggucacugcugugugacccaaugaucuugagcaucacccgucauac

SEQ ID NO: 6928 - RNA, 108 nt, Homo Sapiens
gugugguggagcacgccuguuaucccagcuacucaggaggcugaggugggagaaucaccugagcccgggagguagagguugcagugaguggagaucgugucaccacac

SEQ ID NO: 6929 - RNA, 97 nt, Homo Sapiens
gugugucugguuuccaggaggcaggcgugcugucugaagaggcuuuggaaguaccccaaauaauucaguucuugaccugccccagggccacacacau

SEQ ID NO: 6930 - RNA, 98 nt, Homo Sapiens
guguuagagaccaguuaaaguuaagacacuuucuaaauagaagucuuguauauggggcuuuugagaaaguguuuucccgugaugcuggggggaaacac

SEQ ID NO: 6931 - RNA, 80 nt, Homo Sapiens
guguucgagcacacaccuccuugcaguggcuucagcacccaggucuccgggagccagugaaggaaccaaguguuggauac

SEQ ID NO: 6932 - RNA, 75 nt, Homo Sapiens
guguugagauccuuucacaguugugguuacaauuacguucacaagcuacaccugccaugagagaauacuuggcac

SEQ ID NO: 6933 - RNA, 76 nt, Homo Sapiens
guguuuggaauagagcccagucugaaauuauaagcacugggguacuccuaugugucugggacucuaugccaaguau

SEQ ID NO: 6934 - RNA, 75 nt, Homo Sapiens
guguuuugcacuguaauaccucggucguagcaaagugccgugggaccgaaguauuauggugcagugacuugacgc

SEQ ID NO: 6935 - RNA, 94 nt, Homo Sapiens
guuaccuuccucugccucugcucccuugucuagggcguggagaugagguguccuuccuauucacaggguugcugcgaggacagagugaguuggc

SEQ ID NO: 6936 - RNA, 112 nt, Homo Sapiens
guuacuucagcaaguagaagauggauauuuuugaugcccagaguguugucuuccccguccaggguaucucauucugaucaaaccgaauuggccauccauacugagaaguggc

SEQ ID NO: 6937 - RNA, 90 nt, Homo Sapiens
guuaugaagcuuguaggggguuuagcuccacagggucagaccugcaggugcaaacaggcccuaggcgaacccccuggaggaaacguugac

SEQ ID NO: 6938 - RNA, 114 nt, Homo Sapiens
guuccucuucucauuggcugaugugcucuguggcaucugucacagguuuuaauugaaggucagcaguggcagguaagccaccagcaucaucagcuucuuucagccuuuuggaac

SEQ ID NO: 6939 - RNA, 95 nt, Homo Sapiens
guuccuuaggccacacccugcccucccuggacugccugaccucgcuccaaggcucaggggaagguucugagggcaggugugaaaaugcuuggaau

SEQ ID NO: 6940 - RNA, 89 nt, Homo Sapiens
guucucuauggcuaggcaguaaagaaacagcacccuucauauuuuaagggacugugcuacauuucuucauucuuggcgauuuugagaau

SEQ ID NO: 6941 - RNA, 131 nt, Homo Sapiens
guuuaaaugguuauccgggagaauuccuguuguguggaagaugcuuugcccuuucuucaucuggaaaucauuuuuccauccuuuaggucacagcuuaaacaugauuuucccaggaauuuuucucugaccac

SEQ ID NO: 6942 - RNA, 81 nt, Homo Sapiens
guuuaagaauggcucauguaguacccagcuacucugggcgacugagcccaggguacucugggaucacuugagcccaggagc

SEQ ID NO: 6943 - RNA, 100 nt, Homo Sapiens
guuucccacuuuucucccaucugucauuuuucucuuuccauaaaaagcuaauggugacguuaucaaagagugaaggagucagaggcuaaggguggggaac

SEQ ID NO: 6944 - RNA, 111 nt, Homo Sapiens
guuuggaggucuguugcuuccuugaggcacgguaaggagugguuccaauuuggggugcucacgggauccacagaucucuccuuucuuuccucugccuccccaucuccugau

SEQ ID NO: 6945 - RNA, 90 nt, Homo Sapiens
guuuggugccuauuggauuuuaagcauugggaguugaccuuuauauaaaacaaaaccccuaagcuuauaauucaguagggagaaacagac

SEQ ID NO: 6946 - RNA, 97 nt, Homo Sapiens
guuuggugccuauuggauuuuaagcauugggaguugaccuuuauauaaaacaaaaccccuaagcuuauaauucaguagggagaaacagacaguaaac

SEQ ID NO: 6947 - RNA, 96 nt, Homo Sapiens
guuugugggaggaggacuggcaaaaauaugagaguaggaguuugggcucuugagcuugggccuggccuucaaauuuccacucuuucacucacuagc

SEQ ID NO: 6948 - RNA, 86 nt, Homo Sapiens
guuuugaaggaugcgguguggagccagaggaugugugggagggguuucucuaacacugacuucuauuccaugagcuuuuucaaggc

SEQ ID NO: 6949 - RNA, 100 nt, Homo Sapiens
guuuugacaaaugcagauacauguguaacugaacuuaugacuuuccuuauagaaacuucagaaaguucccucauaccccuuaucucaaucuugucacuac

SEQ ID NO: 6950 - RNA, 96 nt, Homo Sapiens
guuuuuacuauaacauauuuuagaaagcuaacaagcuagagagagcggugaagggcucucucagcauguuccucucugucuguguguuaguuuugc

SEQ ID NO: 6951 - RNA, 128 nt, Homo Sapiens
uaaaacucaccaucaaauagauguaaucuuauuaauuacacauuuuguauuuuaauuauuucaaggagugaagaaaacaggguguuuuuguuuuuguaguucugauuacucauuuaugcauuguuuug

SEQ ID NO: 6952 - RNA, 122 nt, Homo Sapiens
uaaaucugggcugagggaaagcauguccacaccaggugcccagacaucugguuggcuuuggcugauuuguccugcaggcaccugccuugucuggauuugcacacuuuccaaguugcccauua

SEQ ID NO: 6953 - RNA, 122 nt, Homo Sapiens; identical to SEQ ID NO: 6952

SEQ ID NO: 6954 - RNA, 78 nt, Homo Sapiens
uaaauuggaaugacagaagaugagagcuaggaagugguauauuuaauuucuagauuucagggcuggagugguggagua

SEQ ID NO: 6955 - RNA, 79 nt, Homo Sapiens
uaacauauuuuagaaagcuaacaagcuagagagagcggugaagggcucucucagcauguuccucucugucuguguguua

SEQ ID NO: 6956 - RNA, 80 nt, Homo Sapiens
uaagaggcaggcauucuggguaucagacauaaauccccucccaggaacuuuuguguccugacccagaggacuggcucuug

SEQ ID NO: 6957 - RNA, 73 nt, Homo Sapiens
uaagaugaguugauauucaaauauccaguuaguaaugaaaacaauacaauacugagagaaaaagcuugucuug

SEQ ID NO: 6958 - RNA, 130 nt, Homo Sapiens
uaaggaauguggaaaaaccuuuauuuguggcucagaccuuacucgacaucacagaauucacacuggugagaaacccuaugaauguaaggaaugugggaaagccuuuaguagugguucaaacuucacucga

SEQ ID NO: 6959 - RNA, 130 nt, Homo Sapiens
uaaucuuaacauucucaacuaugauuaccaaagcagaaaaauaaaacacauuaaaucacaugcuggcuuaugaaagccuccaucuuuaagugacaugugcacucucguucauaguucauuggccaaagaa

SEQ ID NO: 6960 - RNA, 106 nt, Homo Sapiens
uacauguguuacacucaguguguaaauaacugugaagaggcaauugucagauagcaaauugggcaccugcuguguacgguauauugcacuggggcugacgggugug

SEQ ID NO: 6961 - RNA, 87 nt, Homo Sapiens
uaccuucuuugcugccugggagaugcugcuaugggcguuuauuugaucugcuuguggcucaguuugcucagcagugaaaugaaggug

SEQ ID NO: 6962 - RNA, 130 nt, Homo Sapiens
uacuugggaucaguuagucuagagccugcaaagcaaguggcuuggagagauagugauuuagcucaagagggagugagaugugacuguugccacauguuaaaugcuuuucugggccugauuauuuaaggga

SEQ ID NO: 6963 - RNA, 109 nt, Homo Sapiens
uacuugugcagguuuguuaaauggguuuauuguguaaugcugagauuugggcuucuaaugaucccauugcccaaguagcaaacauaguaccuaauagaaucaauaggua

SEQ ID NO: 6964 - RNA, 76 nt, Homo Sapiens
uagaaauauguaaucgaucuuuucuuuggugggcaauuagcaauauugaggaaaguuaaagauguauguaucccua

SEQ ID NO: 6965 - RNA, 76 nt, Homo Sapiens
uagaaaugagagaugagagguccucuggguaaguggggaacuguuuggucucaucgccuccauuucuacaucucua

SEQ ID NO: 6966 - RNA, 105 nt, Homo Sapiens
uagaagcaucuuuaguuuuaaggaagugucucuuggcuggccccuagauagcuuuaggaugggagcuagucaccagaaacaccaauccuugauuagaagcuugua

SEQ ID NO: 6967 - RNA, 111 nt, Homo Sapiens
uagacuugggagggaaccuuacaguccucuacuccagcucccugauuuuacagaucggggacccaccauucagggcugauaacaaacucaggucucuucacccucagucug

SEQ ID NO: 6968 - RNA, 89 nt, Homo Sapiens
uagcaccccuugcccugugucuguggaacagaagcagcuuccuucagagaagacugcagcucccaaggacacaagcuguugggaugcua

SEQ ID NO: 6969 - RNA, 99 nt, Homo Sapiens
uagcugcacaacacaagcccacaggcaaacacacagacuccugcagugucuagagcagucacugggauaugaagacuguguguggaggcugggcagcua

SEQ ID NO: 6970 - RNA, 72 nt, Homo Sapiens
uaggaaugggaugguuguuuuagguaggcuugggagccaggcugcccugaacucuggccauccacacuucua

SEQ ID NO: 6971 - RNA, 102 nt, Homo Sapiens
uaggagggaggauugcuugaguccaggaguugaaggcuacagugagcuuugaucacaucacugcacucuagccugagcaacaaagcaagaccucaucucuua

SEQ ID NO: 6972 - RNA, 89 nt, Homo Sapiens
uaggcuguaugcuguuaaugcuaaucgugauagggguuuuugccuccaacugacuccuacauauuagcauuaacaguguaugaugccug

SEQ ID NO: 6973 - RNA, 110 nt, Homo Sapiens
uaggggcaguggcagagaaugaauguauguguggguuucucagccuugagguauaaggucuaaaggcucuggggauucacugcauacaccacuuccaguucaagcgccua

SEQ ID NO: 6974 - RNA, 109 nt, Homo Sapiens
uaguauguugagcaucuuuuuguaaguguacuugccaucuguagaucuucuuuggugaagugucuguucagaucugugugcauuuuuaauuggguuguuuaacuuauug

SEQ ID NO: 6975 - RNA, 96 nt, Homo Sapiens
uagucucauccagguaugacaugugccacugugucugaaauuccugagcaccgagggccgcuucaggcaccaggcacuuugccaaccugagagcug

SEQ ID NO: 6976 - RNA, 99 nt, Homo Sapiens
uagugacaagggcaucccaaggcacuugcccagagcugcagaguugugugugccauaccugcggcucaaagggaaggccuucuauccccugaguuucua

SEQ ID NO: 6977 - RNA, 123 nt, Homo Sapiens
uagugagaugaacccgguaccucagauggaaauggagaaaucgccugucuucugcgucucucacgcugggagcuguagaccggagcuguuccuauuuggccaucuuggcuccucucuccucug

SEQ ID NO: 6978 - RNA, 103 nt, Homo Sapiens
uaguguucaagaccuacacuccauccuccuuuaauuugcccaguggccugacacuuggcagggcaagugcugucauauggaagaucuguuuacgugaacauua

SEQ ID NO: 6979 - RNA, 130 nt, Homo Sapiens
uaguguucacauguugcucaguuuugcuaacugauaaaucauuuaauccucuucuucauauguaugaguacuaucuuauaucuguggucaagagugagguaagcaagcuccaacagacccugagaaccua

SEQ ID NO: 6980 - RNA, 77 nt, Homo Sapiens
uaucucaucugguuuuaauccugaaggcauauauguaugacauuaucugucuuuagggaggagacccaacagaggua

SEQ ID NO: 6981 - RNA, 76 nt, Homo Sapiens
uaugaacuggccacuuuucagaugaaaccuggugggccagcucuguggggugaugcauuuaaaagggcaguucaug

SEQ ID NO: 6982 - RNA, 99 nt, Homo Sapiens
uaugagggacaugaacaccugcagauuuugggguccacagggguccuggaauuaauucccuguggauacugagagaugacuggacauccauucuccaug

SEQ ID NO: 6983 - RNA, 104 nt, Homo Sapiens
uaugggaaaaaaggcaguuuagaaaaaaguacauuugguauacaugcauagagaugugcauagcaaauggucugaaugaauggccuuagaccacaguuuucaua

SEQ ID NO: 6984 - RNA, 94 nt, Homo Sapiens
uaugucaccaaauuuggugugcuuucuccuuugccugcugcuucuuucaaguaggacauggagacaacagccaaauuugugcuucagugaugug

SEQ ID NO: 6985 - RNA, 114 nt, Homo Sapiens
uauuauugggcaccuguuaugugagacacuguccuaggcacugugggauaacaacagcaaacacuucacacaacagccuggccuuccuguguuuuacaacagcuccuaaagaua

SEQ ID NO: 6986 - RNA, 106 nt, Homo Sapiens
uauuccagauuucuuaguuuugcucagcaggaugguuggacugaagggggcugguuuacuucuucaguggaaguguucauuuuugcaaauacuaguuacuggaaua

SEQ ID NO: 6987 - RNA, 105 nt, Homo Sapiens
uauugguuucauucuugguaaagaaaucauaaaaguccaggacagaaagugaccuauagggaugaccuggccucuugcccuuuucuuugcuucuggaaagcagua

SEQ ID NO: 6988 - RNA, 109 nt, Homo Sapiens
ucaaguccuguacugcucaauucagugaccacuagccauauguggcuacugagcacuugaaauguggcuaguuugaacugagaugugcucuaaguacacuggauuuuga

SEQ ID NO: 6989 - RNA, 101 nt, Homo Sapiens
ucaauacuuuaaaggcacacuugucugcuuucuacacuguugccggagaagggucauaaagugaaguuuggcagaaaaguuuggccauugucuaguacuga

SEQ ID NO: 6990 - RNA, 107 nt, Homo Sapiens
ucacauucuccauaacuggauaugagggaagcaugggaccaugaucccuggagggacugcagggauugcccacgcuagucaucucacuguacagcuggagaaacuga

SEQ ID NO: 6991 - RNA, 124 nt, Homo Sapiens
ucacccagugguucucucagcaacagacauguccaguggaccguaguguugugacggucgcccaucugcgcccaguaccucggaucaugcggaacauguugucaaagcugcagauugccuguga

SEQ ID NO: 6992 - RNA, 80 nt, Homo Sapiens
ucacccuguugccuaggcaggacggaaugcagugaagucaucauaguuuacuguaacacugaacuccugggcucaaguga

SEQ ID NO: 6993 - RNA, 130 nt, Homo Sapiens
ucacgucucugcaaaguagcaagugguuauguucauaucauuuugaaagcugaguggauagauuuaaauagcaagagcuuuguucggaaugauguguggaacccagaaucacagacccugcgauacauga

SEQ ID NO: 6994 - RNA, 76 nt, Homo Sapiens
ucacucugucgcccaggcuggagugcagugguacagccucagcucacugcaaccuccaccucccgggcucaaguga

SEQ ID NO: 6995 - RNA, 73 nt, Homo Sapiens
ucacucugugguccagacuggaguauagugcuaucagagcuuacuacaacuuuaaacuucugggcucagguga

SEQ ID NO: 6996 - RNA, 76 nt, Homo Sapiens
ucacucuguugcccaggcuggagugcaguggugcaaucuuggcucacugcaaccuccaccucccggguucaaguga

SEQ ID NO: 6997 - RNA, 76 nt, Homo Sapiens
ucacuggaacccaggagguggagguugcagugagucaagauagugccacugcacuccagccugggcaacagaguga

SEQ ID NO: 6998 - RNA, 78 nt, Homo Sapiens
ucacuggaaccugggagguggagguugcagugagcugagacugugccacugcacuccagccugggcaacagagcaaga

SEQ ID NO: 6999 - RNA, 76 nt, Homo Sapiens
ucacuuaaacccgggagguggagguugcagugaguggagauggugccacugcacuccagccugggugacagaguga

SEQ ID NO: 7000 - RNA, 77 nt, Homo Sapiens
ucacuugaacccaggagacggaguuuguggugagccgagaucacaccauugcacuccagccugggcaacaacaguga

SEQ ID NO: 7001 - RNA, 78 nt, Homo Sapiens
ucacuugaacccgggaaggcggagguugcagugagccgagaucgugccacugcacuccagccugggcaacaagaguga

SEQ ID NO: 7002 - RNA, 77 nt, Homo Sapiens
ucacuugaacccgggaggcggagguugcagugagcugaggucgugccacugcacuccagccugggcaacaagaguga

SEQ ID NO: 7003 - RNA, 76 nt, Homo Sapiens
ucacuugaacccuggaggcagagguugcagugagccgauaucaugccacugcacuccagccugggcaacacaguga

SEQ ID NO: 7004 - RNA, 77 nt, Homo Sapiens
ucacuugaacucgggaggggaggcugcagugagccaagaucacacaccacugcacuccagccugggcaacaaaguga

SEQ ID NO: 7005 - RNA, 76 nt, Homo Sapiens
ucacuugagcccaggaguuggaggcugcagugagcuaugauugcaccacuguacuccagccugggugacagaguga

SEQ ID NO: 7006 - RNA, 76 nt, Homo Sapiens
ucacuuuggugauaucaugggaagguguacuuccggugaugccuagaggucacguccugugaugucauuaggcuga

SEQ ID NO: 7007 - RNA, 87 nt, Homo Sapiens
ucagagacaccucucauuucuccucaaugccacugcacugaugucaacugacuuagggcaggcaugagagaacugagguuuacaugg

SEQ ID NO: 7008 - RNA, 114 nt, Homo Sapiens
ucagaucaguagugacaugagauuuucauaggagcagaaacccuauugugaacuccaaacacaagggaucuagguuaugcacuacuuaugagaaucuaaugccugaugaucuga

SEQ ID NO: 7009 - RNA, 111 nt, Homo Sapiens
ucagccagacgugauggaggaaauggugguaucuuguguuauuaagcacuugaacuugguugaugcacugcagucucuaauaaauuuccaauaucaagaagaacaugcuga

SEQ ID NO: 7010 - RNA, 102 nt, Homo Sapiens
ucaggccuggagcccaggaagucugguuucgaauuucaugcuucuaaccugagcacuguacugcuugguggaguucucugcuaguccuaccuuucaggcaga

SEQ ID NO: 7011 - RNA, 107 nt, Homo Sapiens
ucagucccuuugggugugacugcuguacacauuuucauguuaccauugacaucuucaguuuuucaaugugauguguaaugcauauaagcagcauauguagugguuga

SEQ ID NO: 7012 - RNA, 81 nt, Homo Sapiens
ucaguucuguuuaucugaaggcuccuacccagagauucuacccagugaaacucccacagcagcgcagguagauggggcuga

SEQ ID NO: 7013 - RNA, 84 nt, Homo Sapiens
ucauacuguaauguuaguuugcaugaaaagcucuguggugcaguggcaaacagggcuaaggauguuugcugaugucgcagugga

SEQ ID NO: 7014 - RNA, 91 nt, Homo Sapiens
ucauagucugcguuuguuugugcccaucuuuuuugggaagucuuuccagguauucacagagacuugggccucaaacugaaugaugcugugg

SEQ ID NO: 7015 - RNA, 123 nt, Homo Sapiens
ucaucuauccccuaggccagauuaucuuaucagcuacugacccaguuagcuuuccuacuucacaacagguuucuaaugcuuuaugucagugugagagaaauggcaaguugggaaaauuuguga

SEQ ID NO: 7016 - RNA, 131 nt, Homo Sapiens
ucaugguuccuggaagguaagauugguggccaccacauucagucuccuucacagcuaaguguagccacauaacuaugcuuuggccacggggauaugaaugcuacuacuaauuuuuucccuugaaacaaugg

SEQ ID NO: 7017 - RNA, 84 nt, Homo Sapiens
ucauuccucuuaaucuucacuaaaauggacaaguauucauugagcaccuaaugcguguucaguauggugggagaugagggauga

SEQ ID NO: 7018 - RNA, 101 nt, Homo Sapiens
uccacaguuugaucucuucucuguucccuccacacucuucuuuugcuccucuuccuguauuucagagugguuaagaucauggaagucagacaagcuauggg

SEQ ID NO: 7019 - RNA, 100 nt, Homo Sapiens
uccacuacuguuguggcuuuugcaaauuacuaaauuucucugugacuacuuuuccauuucuuaaguaauuugguugguuuccaaaagucaauaaugugga

SEQ ID NO: 7020 - RNA, 88 nt, Homo Sapiens
uccagacacuuucuuccuucaguucagggaacccucaauacacaguaagaaugaagagguugcaggucugagcuugaggaggacugga

SEQ ID NO: 7021 - RNA, 93 nt, Homo Sapiens
uccaggucuggggcaugaaccuggcauacaauguagauuucuguguucguuaggcaacagcuacauugucugcuggguuucaggcuaccugga

SEQ ID NO: 7022 - RNA, 86 nt, Homo Sapiens
uccaguucuucugggagaaaaauggcaggcuucuggggaaagaaagccagcugaauuuugacuccaucuccccagaagaugcuggg

SEQ ID NO: 7023 - RNA, 76 nt, Homo Sapiens
uccauugccaaggcugaccuuaucgucacuacgccagagaagugggauggagucagcagaagcuggcaaaauagga

SEQ ID NO: 7024 - RNA, 75 nt, Homo Sapiens
ucccacagucgggaggaaaagaaagaagacucuguuguucauuguuuuuaucuuuuucuccagaugccuguggga

SEQ ID NO: 7025 - RNA, 96 nt, Homo Sapiens
ucccagauucuuccugguggaggcauucggagagcaacacccuggccuuaacacacuacauaucuuugaauuucacacgggggcagccuucuggga

SEQ ID NO: 7026 - RNA, 106 nt, Homo Sapiens
uccccuaggccagauuaucuuaucagcuacugacccaguuagcuuuccuacuucacaacagguuucuaaugcuuuaugucagugugagagaaauggcaaguuggga

SEQ ID NO: 7027 - RNA, 98 nt, Homo Sapiens
uccccuuccucuuucccucccaguuguaaauaacauuuuuuagcagcaauguaaucugcuaaauguuaguuguuuagggaaguccugagaaaagggga

SEQ ID NO: 7028 - RNA, 110 nt, Homo Sapiens
ucccggaguuuauggucuggugagaagaucccugcucugagucacugccaagcucuagcuaugugacuuugaacagggaauuucugucccuaucuauaaaauaaacgggg

SEQ ID NO: 7029 - RNA, 83 nt, Homo Sapiens
ucccuaucacgugcagcuuugcugacgucauugagagauaaauuagguacaagugggcagagaauuguaugugagguuaggga

SEQ ID NO: 7030 - RNA, 93 nt, Homo Sapiens
ucccuccugugucccaaaacgaaaacacuccuauauuuuguagcgccuuccagaauggggcagcggaaacuaguguugggacaaaggaggcga

SEQ ID NO: 7031 - RNA, 111 nt, Homo Sapiens
ucccucugcuagugaguacaaaugaagucugugggccaacaaggagcgaggagcaguuuccuggaagcccugggcugguguuugacuugcuuugagauagaauaaauggga

SEQ ID NO: 7032 - RNA, 94 nt, Homo Sapiens
ucccugaccacaccuuuacucagaagucuaaggaacagacuguuuaaccuguuuccagugguuucagggacuucuguauuggguguagcaagga

SEQ ID NO: 7033 - RNA, 91 nt, Homo Sapiens
ucccuguccugucuucgaguauuuguuuuuaaugcugggugucgaucgagacaacaagcgcucagagcaaagcaaggaugcauuacggggg

SEQ ID NO: 7034 - RNA, 73 nt, Homo Sapiens
ucccuucagagcccauggguuucccauucccuccugucagcccuggccaugaaauccuggggaucuggaggga

SEQ ID NO: 7035 - RNA, 94 nt, Homo Sapiens
ucccuuuuauuaaccaucuucccuuucucgaguauacacaaguagaaaagaaacagugaaguaccccgauagggaggguggggagaggauggga

SEQ ID NO: 7036 - RNA, 99 nt, Homo Sapiens
uccuacaacuugagucuuugauacuggugucacuuucaggagcucuaagaauacgucaacucucgcuucugaguuggugaccccucaaccaagaaagga

SEQ ID NO: 7037 - RNA, 62 nt, Homo Sapiens
uccucagcguguuaacugaagccuuguugaguuuaacaaagcugccauugaagaucugggga

SEQ ID NO: 7038 - RNA, 100 nt, Homo Sapiens
uccuccagugaacggugacuugacagagguacauaggaggcuacuuguucucuuguuggcugcuuguauuugcuuucuggaagguuauuguuuucaagga

SEQ ID NO: 7039 - RNA, 108 nt, Homo Sapiens
uccucccccaggcauucuggucacuguuccuuuuuguugagaucauucucggugucucauauagcuggguugcagcuccguucuuugccaggaggugguaauagagga

SEQ ID NO: 7040 - RNA, 108 nt, Homo Sapiens
uccucuccacgcuuuacuuuuagguaacugcuuuuguugugcagggacugguguaccacagcacaccuccucccgccuggaguaaagcagcugaccgcgugaagggga

SEQ ID NO: 7041 - RNA, 92 nt, Homo Sapiens
uccugacgggguccucuggcugcauuuaggaacaaggagcuccccgaguaaccugaaguccacucugcccagaggccccacaacuuacagga

SEQ ID NO: 7042 - RNA, 79 nt, Homo Sapiens
uccugaggccuggagauacuagaggguaaaggaauggaaccaugucuggggucccuuuaguaacuugcagggucuggga

SEQ ID NO: 7043 - RNA, 76 nt, Homo Sapiens
uccugcauggcaguuccauaugcagagccagaauccauccuuguuccuucugcauugugagaaaauccauggagga

SEQ ID NO: 7044 - RNA, 74 nt, Homo Sapiens
uccugugcugcaguagaaauuagagcauguccugcuuuaugcaggcuuugcuuuaguucuucugaaguguauga

SEQ ID NO: 7045 - RNA, 76 nt, Homo Sapiens
uccuucaguggaugauguuuucuguggucuuguucaggaauuuacaaacuagaggaagccuuaucucaccaaggga

SEQ ID NO: 7046 - RNA, 90 nt, Homo Sapiens
ucgcagucagacguuuggcaacagcaguggaagaggcaacuggugcuuuucagcuaggccuugaaaaauugcuucagagguugauuucga

SEQ ID NO: 7047 - RNA, 78 nt, Homo Sapiens
ucgcucuuuguugcccaggcuagagugcaguggcaugaucucggcucacugcaaccucugccuccuggguucaagcga

SEQ ID NO: 7048 - RNA, 78 nt, Homo Sapiens; identical to SEQ ID NO: 7047

SEQ ID NO: 7049 - RNA, 77 nt, Homo Sapiens
ucgcuugaacccaggaaguggagguugcagugagccaauauugugccauugcacuccagcuugggcaacaagagcga

SEQ ID NO: 7050 - RNA, 76 nt, Homo Sapiens
ucgcuugaacccaggagguggagguugcagugaaugaagaucgugccacugcacuccagccugggcgauagagcga

SEQ ID NO: 7051 - RNA, 77 nt, Homo Sapiens
ucgcuugaaccccggaggcagagauugcagugagccgagaucaugccacugcacuccagccugggcaacaagagcga

SEQ ID NO: 7052 - RNA, 76 nt, Homo Sapiens
ucgcuugaacccgggaggcagagguaguagugagcugaagucccgccacugcacuccagccugggcaacagagcga

SEQ ID NO: 7053 - RNA, 77 nt, Homo Sapiens
ucgcuugaacccuggagguggagguugcagugagcugagaucguagccacugcacuccagucugggugacagaguga

SEQ ID NO: 7054 - RNA, 77 nt, Homo Sapiens
ucgcuugaacucgggaggggaggcugcagugagccaagaucacacaccacugcacuccagccugggcaacaaaguga

SEQ ID NO: 7055 - RNA, 77 nt, Homo Sapiens; identical to SEQ ID NO: 7054

SEQ ID NO: 7056 - RNA, 77 nt, Homo Sapiens; identical to SEQ ID NO: 7054

SEQ ID NO: 7057 - RNA, 77 nt, Homo Sapiens; identical to SEQ ID NO: 7054

SEQ ID NO: 7058 - RNA, 77 nt, Homo Sapiens; identical to SEQ ID NO: 7054

SEQ ID NO: 7059 - RNA, 74 nt, Homo Sapiens
ucgcuugaacucgggcggcggaaguugcagugagcugagauugcaccacugcacuccagccugggcaacaguga

SEQ ID NO: 7060 - RNA, 76 nt, Homo Sapiens
ucgcuugagcccaggaguucgaggcugcagugagcugugaucacaccacugcacuccagccugggcaacagagcga

SEQ ID NO: 7061 - RNA, 107 nt, Homo Sapiens
ucuagggagacccaggacccgggagagagguagaggggagcagagacagccaccagcuucuaucuucugcucuaagcacauucuuucacgaguuuaaguuuccuaga

SEQ ID NO: 7062 - RNA, 113 nt, Homo Sapiens
ucuauaugagacuaacuaagguauuugccccuuggagcuuuuauagucuuuaaaaugagauaaugucugugaaaugcuuuuaggacacugccuggcauaaacacucaugaaga

SEQ ID NO: 7063 - RNA, 97 nt, Homo Sapiens
ucucaacuucuuuaugucucuguacaguggguguagggaccagccacacagggucgguggguuuuucuccccgugugcagagaugagagauuguaga

SEQ ID NO: 7064 - RNA, 71 nt, Homo Sapiens
ucucccaggcaauauuccaggauaggcugccaguuggacuaaggaagccacuccugcggaacccugggaga

SEQ ID NO: 7065 - RNA, 127 nt, Homo Sapiens
ucucucuucccucucaucauagauuaaucacuuaguugcaagggaccaguaaauuaacagaauggugaacauuuuccuuuucuuggugcuuuugcuggaugacuagugguuucugcuggaacagaga

SEQ ID NO: 7066 - RNA, 99 nt, Homo Sapiens
ucucucuuucccaggcuuccuguccuucagcaaggccaccugagaacugaauuguaaauuccagccuugcaaggaaggggaggaggcugaaagacaaga

SEQ ID NO: 7067 - RNA, 100 nt, Homo Sapiens
ucucugagccucugcugcuuuucuuguguaacaaaaugaauaauaccugcccugaggggcuauggcagguaaaggagagugcaggcagagguugcagagg

SEQ ID NO: 7068 - RNA, 85 nt, Homo Sapiens
ucucuggcacuuccaaucuccuaccugugauagacgucuaagugaaaguacuagcuuaguuguuugggauugguagugacagaga

SEQ ID NO: 7069 - RNA, 74 nt, Homo Sapiens
ucucugucuuccauuccccuccuacgcccccagacugugagggguguaaggaagauggaagauguugcgggagg

SEQ ID NO: 7070 - RNA, 101 nt, Homo Sapiens
ucucuuaacaauuuccgggcugaacagccucaccagcaugccauguacuaccuccgcuugcugaugacugaaguggccuggacuaaagaugaguuaaaaga

SEQ ID NO: 7071 - RNA, 79 nt, Homo Sapiens
ucugagucagugggcugagaaaggcugcccaccuuucaucuaggugggcacaacguaaucagcugccagcuugaccaga

SEQ ID NO: 7072 - RNA, 77 nt, Homo Sapiens
ucugauccuggaacugcauugcuugguggucaggagggguucuuaguaagcaaacucaguuuaaucccagagucgga

SEQ ID NO: 7073 - RNA, 96 nt, Homo Sapiens
ucugccaguuuuuaugccacacuggcucugugcuucuaguaucugcauuuaaugcuuagauucuaccagagcuaguuugggcacaaaguuuccaga

SEQ ID NO: 7074 - RNA, 110 nt, Homo Sapiens
ucugcucaugauuacugggccaauaccacugcaaugacugucagaacaauucuugugaaaguuguuuuuauaagccuuguaguuuguugaaguugagguucaagggcaga

SEQ ID NO: 7075 - RNA, 102 nt, Homo Sapiens
ucugucucucucucaucuuccuuuugccacccaggcuggaauguaguggugugaucacagcucacuacagccuggauucagcacacaggaaucagagucaga

SEQ ID NO: 7076 - RNA, 87 nt, Homo Sapiens
ucugugguugaaggaauggauggaagugugugagcuagauugcacagauagcaagcagaacauuucuggugaacuuggacacacaga

SEQ ID NO: 7077 - RNA, 89 nt, Homo Sapiens
ucuuaccccaguauccuauuaucucauaccuaaggcagugaugguuucucagaccucuuagauugagaagauguggcauggguguaagg

SEQ ID NO: 7078 - RNA, 98 nt, Homo Sapiens
ucuucauuauccucuauaucauugcuaugcccugguguugugcccgggguacaacacguaguagguguucgauaaacuuggguuggauaaauggaaga

SEQ ID NO: 7079 - RNA, 93 nt, Homo Sapiens
ucuuucacuggaaucacaucugcagcuccucccccuccgcccucccucaggcuuagaccguggagcuguaacagaucuguucuucgugugaga

SEQ ID NO: 7080 - RNA, 90 nt, Homo Sapiens
ucuuucccaggcuuccuguccuucagcaaggccaccugagaacugaauuguaaauuccagccuugcaaggaaggggaggaggcugaaaga

SEQ ID NO: 7081 - RNA, 114 nt, Homo Sapiens
ucuuucucuaauuuguccaccaguaguaugcaucuuuuucuccacuagccaggggcuauggaggcccugaauagaacagaagagcagcuagcaagggcggaaggaagagagaga

SEQ ID NO: 7082 - RNA, 130 nt, Homo Sapiens
ucuuuucuuugguaggcuagccuucgagacugcauuacccuccccaacuuaaaaucuuuugauaacccaggcagcuggguuauccccaauuuaaagucuuuuuguuguagcuguauggcauuuaucuaga

SEQ ID NO: 7083 - RNA, 79 nt, Homo Sapiens
ucuuuuucucagugucucuguuguggcagucaugaaugagacucugucagaucuccauggcagggaccugauugacaga

SEQ ID NO: 7084 - RNA, 110 nt, Homo Sapiens
ugaaccagcuucucagcucuacuguguuugacccuguguucaagguuaggggaauuauaguuucccaggucuccaucguggggguaaucagaggggcagagaaggcuuca

SEQ ID NO: 7085 - RNA, 101 nt, Homo Sapiens
ugaaccccggagacagagguugcagugagccgagauacauacauauauauguauauaucaugugcaacuuggcucugcuccuuuguaaguuugugggcuua

SEQ ID NO: 7086 - RNA, 92 nt, Homo Sapiens
ugaagacuccaucacaguuccagauggguaggaauaccuugcagggcuggggcaagguauugccuucucuggaaggcugugcauucucuuca

SEQ ID NO: 7087 - RNA, 109 nt, Homo Sapiens
ugaaucacuguggaaaacaucaguaauucaacaaccuugcugcugaccucuuauucaguuaaaugagagcaaguguugaaacagcugguggugguucacaucaaaauca

SEQ ID NO: 7088 - RNA, 82 nt, Homo Sapiens
ugaauuugugacuugucugguuuggcaucucgaagggcuuucucuacuggguccagggugccacagaacaggucagcauuca

SEQ ID NO: 7089 - RNA, 101 nt, Homo Sapiens
ugacaaucuugguuaccauccauuaagugcugcugauuuuggaaagaucaugaaaaacgucuuuccaaacaugaaggcacgucguuugggcacaagaggca

SEQ ID NO: 7090 - RNA, 113 nt, Homo Sapiens
ugacacuuucuguaaacgccaucugugcuuuucucccauuuguacugcccuguauauccccguucagcauugccaguguuuccagccaccucuuaaagcauucugaaguuuca

SEQ ID NO: 7091 - RNA, 99 nt, Homo Sapiens
ugacccuccagaccucacauuuguucuggagcccauacucaccaaucagcuuuagcuuuuggucgagaugagguuucucgaagggucucugcaggguca

SEQ ID NO: 7092 - RNA, 100 nt, Homo Sapiens
ugagaaggagucucauucuguugccuaggccggagugcagugacaugaucuuggcucacugcaaucuccaccuccagguucaagugauucuccugccuca

SEQ ID NO: 7093 - RNA, 95 nt, Homo Sapiens
ugagaagucaguccugauggcagcugugcagagugggggugaggaggccaacuuacugcuuccugaacugggcagugccuucuaugacauggcca

SEQ ID NO: 7094 - RNA, 92 nt, Homo Sapiens
ugagaauugcuugaacccaggaggcagagguugcagugagccgagaucgugccacugcacuccauccugagugacaaagcaagacugucuca

SEQ ID NO: 7095 - RNA, 101 nt, Homo Sapiens
ugagacaaaagaauugcuugaaccugggagguggaaguugcagugagccaagauugugccacugcacuccagccugggcaauaaggcaagacuccgucuca

SEQ ID NO: 7096 - RNA, 99 nt, Homo Sapiens
ugagacagaagaaucgcuugaacucgggcggcggaaguugcagugagcugagauugcaccacugcacuccagccugggcaacagugagacucugucuca

SEQ ID NO: 7097 - RNA, 101 nt, Homo Sapiens
ugagacaggagaaucacuugaacuccggagguugagguuucagugggccgagaccgagcgacugcacuccagccugggcaacagagcgagacuccauuuca

SEQ ID NO: 7098 - RNA, 102 nt, Homo Sapiens
ugagacaggagaaucgcuugaacccgggaggcagagguugcagugagaugagaucacaccacugcacuccagccugggcaacaagagcgaaacuccaucuca

SEQ ID NO: 7099 - RNA, 101 nt, Homo Sapiens
ugagacaggagaaucgcuugaacccgggagguggagguuacggugagugagaucgcgccauugcacuccagccugggcaacaagagcgaaacuccgucuca

SEQ ID NO: 7100 - RNA, 101 nt, Homo Sapiens
ugagacaggagaauugcuugaaccuggcaggcggagguuacagugagccaagaugguaccacugcacuccagccugggcaacauagcaacacucugucuca

SEQ ID NO: 7101 - RNA, 98 nt, Homo Sapiens
ugagacaguaucacuugaacccaggggguggagguugcggugagccgagauugugccacugcacuccagccugggcaacagagugagacucuguuuca

SEQ ID NO: 7102 - RNA, 102 nt, Homo Sapiens
ugagacggaguuucgcucuugucccccaggcuuuagugcaauggcgcgaucucggcucaccgcagccuccgccaccuggguucaaacgauucuccugccuca

SEQ ID NO: 7103 - RNA, 91 nt, Homo Sapiens
ugagaggacugcuugaacucgggguggagguugcagugagccaagaucgccccacugcacuccagccugggcaacaaugcaagaccccuca

SEQ ID NO: 7104 - RNA, 104 nt, Homo Sapiens
ugagauggaguuuugcucuuguugcccaggcuguaguguaauguagugcaaucuuggcuuaguacaaccucugccuccuggguucaagccauucuccugccuca

SEQ ID NO: 7105 - RNA, 101 nt, Homo Sapiens
ugagaugggaggacugcuugagcccaggagguugagguugcagugaaccaugaucaugucacugcacuccagccuggguaacagagugagaccuuguuuca

SEQ ID NO: 7106 - RNA, 93 nt, Homo Sapiens
ugagauuucuaaggcacugcuucuaaguaggaaucacacugcaguggguuagugacacccugcucagaaauggugccugugcaaaauguuuca

SEQ ID NO: 7107 - RNA, 100 nt, Homo Sapiens
ugaggcaagagaaucacuugaacucaggagguggagguugcagugagccaagaugcaccacugcacuccagccugggcaacagagugagacucugucuca

SEQ ID NO: 7108 - RNA, 102 nt, Homo Sapiens
ugaggcaagagaaucgcuugaacccaggaggcagagguugaagugagccgagaucgugccauugcacuccagccugggcaacaagagcgaaacuccgucuca

SEQ ID NO: 7109 - RNA, 103 nt, Homo Sapiens
ugaggcaaggucagaaaaggucaggcaauuuuugccuuguucauugcaacacucccuuuggagcucugaguuuaagcuaagaagucugacuaccuugcugcca

SEQ ID NO: 7110 - RNA, 106 nt, Homo Sapiens
ugaggcacaagaauugcuugaaccugggagggggagguuucagugagccgagccgagauugugucacugcacuccagccugggcaacagagugagacucugucuca

SEQ ID NO: 7111 - RNA, 101 nt, Homo Sapiens
ugaggcacgagaaucgcuugaacccaggaggcggaggcugcagugagcagagaucacgccacugcacuccagccugggcaacagagggagacucugucuca

SEQ ID NO: 7112 - RNA, 101 nt, Homo Sapiens
ugaggcagaagaaucucuuaaacccgggaggcggagguugcagugagccgagauugcgucacugcacuccagccugggcaacagagcgagacuccguuuca

SEQ ID NO: 7113 - RNA, 101 nt, Homo Sapiens
ugaggcaggaaaaucacuugaacccuggaggcagagguugcagugagccgauaucaugccacugcacuccagccugggcaacacagugagacucugucuua

SEQ ID NO: 7114 - RNA, 99 nt, Homo Sapiens
ugaggcaggaaaaucgcuugaacccaaggcagagguugcagucagcagauauugcaccacugcacuccagccugggcaacaaagcaagacucugccuca

SEQ ID NO: 7115 - RNA, 99 nt, Homo Sapiens; identical to SEQ ID NO: 7114

SEQ ID NO: 7116 - RNA, 99 nt, Homo Sapiens; identical to SEQ ID NO: 7114

SEQ ID NO: 7117 - RNA, 102 nt, Homo Sapiens
ugaggcaggaaaauggcuugaacccgggagguggagguugcagugagcugagauugcgccacugcacuccagccugggcaacaagagcaaaacuccgucuca

SEQ ID NO: 7118 - RNA, 101 nt, Homo Sapiens
ugaggcaggaagaucacuugagcccaggagguggaggcugcagugacccauauucaugccacugcacuccagccugggcaacagagugagacccucucuca

SEQ ID NO: 7119 - RNA, 101 nt, Homo Sapiens; identical to SEQ ID NO: 7118

SEQ ID NO: 7120 - RNA, 101 nt, Homo Sapiens; identical to SEQ ID NO: 7118

SEQ ID NO: 7121 - RNA, 101 nt, Homo Sapiens; identical to SEQ ID NO: 7118

SEQ ID NO: 7122 - RNA, 101 nt, Homo Sapiens; identical to SEQ ID NO: 7118

SEQ ID NO: 7123 - RNA, 101 nt, Homo Sapiens
ugaggcaggacaaucacuugaacccaggaguuugaggcugcagugagccgagaucacgccacugcacuccacccugggcaacagagcaagaucuugucucg

SEQ ID NO: 7124 - RNA, 104 nt, Homo Sapiens
ugaggcaggagaaccgcuugaacccaggaggaggaggagguugcagugggccgagaucgagccacugcacuccagccugggcaacagagugagacuccaucuca

SEQ ID NO: 7125 - RNA, 100 nt, Homo Sapiens
ugaggcaggagaaggcgugaacccaggaggcggagcuugcagugagcagagaucgugccacugcacuccagccugggcaacagagcgagacuccgucuca

SEQ ID NO: 7126 - RNA, 102 nt, Homo Sapiens
ugaggcaggagaauagcuugaacccaggagguggagguugcagugagucgagauugcaccauugcacuccagccugggcaacaagagcaaaacucugucuca

SEQ ID NO: 7127 - RNA, 101 nt, Homo Sapiens
ugaggcaggagaauagggugaacccaggagguggagcuugcagugagccgagaucgcgccacugcacuccagccugggcaacagagcgagacuccgucuca

SEQ ID NO: 7128 - RNA, 102 nt, Homo Sapiens
ugaggcaggagaaucacuugaacccaagaggcggagguugcagugagcugagaucgcgccacugcacuccagccugggcaacaagagcaaaacuccgucuca

SEQ ID NO: 7129 - RNA, 101 nt, Homo Sapiens
ugaggcaggagaaucacuugaacccaggaagaggagguugcaguaagccgagaucgugccacugcacuccagccugggcaacaaagugagauucccucuca

SEQ ID NO: 7130 - RNA, 101 nt, Homo Sapiens
ugaggcaggagaaucacuugaacccaggaggcagagguugcagugagcugagaucaugccacugcacuccagccugggcaacagagugaggcuccuucuca

SEQ ID NO: 7131 - RNA, 102 nt, Homo Sapiens
ugaggcaggagaaucacuugaacccgggaggcagagguugcagugagccaagaucgcaccacugcacuccagccugggcaacaagggcgagacucugucuca

SEQ ID NO: 7132 - RNA, 102 nt, Homo Sapiens
ugaggcaggagaaucacuugaacccgggagguggagcuugcggugagccgagaucgcgccauugcacuccagccugggcaacaagagugaaacuccaucuca

SEQ ID NO: 7133 - RNA, 101 nt, Homo Sapiens
ugaggcaggagaaucacuugaacccgggagguggagguugcagugagcugagauugcgccacugcacuccagccugggcaacagagcgagacuccaucuca

SEQ ID NO: 7134 - RNA, 100 nt, Homo Sapiens
ugaggcaggagaaucacuugaaccugggaggcaagagguugcagugagcugagaucauaccacugcacucuggccuggguaacagagcgagacugucuca

SEQ ID NO: 7135 - RNA, 102 nt, Homo Sapiens
ugaggcaggagaaucauuugaacccaggagguggaaguugcagugagcucagaucgcaccauugcacuccagccuggguaacaagaaugaaacuccaucuca

SEQ ID NO: 7136 - RNA, 101 nt, Homo Sapiens
ugaggcaggagaaucgcuugaacccagaaggcagagguugcagugagccaagauggugccacugcacuccagccugggcaacagagcgagacucuaucuca

SEQ ID NO: 7137 - RNA, 102 nt, Homo Sapiens
ugaggcaggagaaucgcuugaacccaggaggcggagguuguggugagcgaagaucgugccauugcacuccagccugggcaacaagagcaaaacucugucuca

SEQ ID NO: 7138 - RNA, 102 nt, Homo Sapiens
ugaggcaggagaaucgcuugaacccaggagguggaggcuguggugagcugagauugcgccauugcacuccagccugggcaacaagagcgaaacuccaucuca

SEQ ID NO: 7139 - RNA, 102 nt, Homo Sapiens
ugaggcaggagaaucgcuugaacccaggagguggagguugcagugagccgagaucgcgccauugcacuccagccugggcaacaagagcagaacuccgucuca

SEQ ID NO: 7140 - RNA, 101 nt, Homo Sapiens
ugaggcaggagaaucgcuugaacccagguggcaaggcuugcagugagcugagaucgcacuacugcacuccagccugggcaacagagcgagacuccagcuca

SEQ ID NO: 7141 - RNA, 103 nt, Homo Sapiens
ugaggcaggagaaucgcuugaaccccgggagguggagguugcagugagccgagaucgcgccauugcacuccagccugggcaacaagagugaaacacugucuca

SEQ ID NO: 7142 - RNA, 102 nt, Homo Sapiens
ugaggcaggagaaucgcuugaacccggaaggcagagguuguggugagcugagauugcaccauugcacuccagccugggcaauaagagcaaaacucugucuca

SEQ ID NO: 7143 - RNA, 102 nt, Homo Sapiens
ugaggcaggagaaucgcuugaacccgggaggcggaggucguggugagccaaaaucgcaccauugcacuccagccugggcaacaagagugaaacucugucuca

SEQ ID NO: 7144 - RNA, 101 nt, Homo Sapiens
ugaggcaggagaaucgcuugaacccgggaggcggagguuguggugagccgagaucucgccacugcacuccagccugggcaacagagugagacuccgucuca

SEQ ID NO: 7145 - RNA, 100 nt, Homo Sapiens
ugaggcaggagaaucgcuugaacccggggggaggagguuacagugagcugagaucgcgccacugcacuccagccugggcaacaagagugaaacugucuca

SEQ ID NO: 7146 - RNA, 100 nt, Homo Sapiens
ugaggcaggagaaucgcuugaaccuggcagguggagguugcagugagccgagaucgcaccauugcacuccagccugggcaacaagcacaaaacugucuca

SEQ ID NO: 7147 - RNA, 102 nt, Homo Sapiens
ugaggcaggagaaucgcuugaaccugggaggcagagguuguggugagccgagaugaggucauugcacuccagccugggcaacaagugugaaacuccgucuca

SEQ ID NO: 7148 - RNA, 99 nt, Homo Sapiens
ugaggcaggagaaucgcuugaaccugggagguggagguuguggugagccgagaucgcgccauugcacuccagccugggcaagagcaaaacucugucuca

SEQ ID NO: 7149 - RNA, 102 nt, Homo Sapiens
ugaggcaggagaaucgcuugaagccgugagguggagguuuuggugagcugagaucgcgccauugcacuccagccugggcaacaagagcgaaacucugucuca

SEQ ID NO: 7150 - RNA, 102 nt, Homo Sapiens
ugaggcaggagaaucgcuuuaacccgggaggcagagguuguggugagccgagaucgcgccauugcacuccagccugggcaacaagagcggaauucugucuca

SEQ ID NO: 7151 - RNA, 102 nt, Homo Sapiens
ugaggcaggagaaucgguugaacccaggaggcagagguuguggugagccgagaucguaccauugcacuccagccugggcaacaagagcaaaacuccgucuca

SEQ ID NO: 7152 - RNA, 99 nt, Homo Sapiens
ugaggcaggagaaucguuugaaccuaggaggcggagguuccagugagcugagauggcgccacugcacuccagccugggcaacagagugagacugucuca

SEQ ID NO: 7153 - RNA, 102 nt, Homo Sapiens
ugaggcaggagaaucguuugaaccugggaggcggagguuguguugagccgagaucucgccauugcacuccagccuaggcaacaagagcgaaacuccaucuca

SEQ ID NO: 7154 - RNA, 101 nt, Homo Sapiens
ugaggcaggagaauggccugaaccuaggagguggagcuugcagugagccgagauagcgccacugcacuccagccugggcaacagagcgagacucugucuca

SEQ ID NO: 7155 - RNA, 101 nt, Homo Sapiens
ugaggcaggagaauggcgugaacccgggaggcagagcuugcagugagcccagauugcgccacugcacuccagccugggcaacagagcgagacuccgucuca

SEQ ID NO: 7156 - RNA, 101 nt, Homo Sapiens
ugaggcaggagaauggcgugaacccgggaggcggagcuugcagugagccgagaucgcgccacugcacuccagccugggcaacagagugagacuccgucuca

SEQ ID NO: 7157 - RNA, 101 nt, Homo Sapiens; identical to SEQ ID NO: 7156

SEQ ID NO: 7158 - RNA, 101 nt, Homo Sapiens; identical to SEQ ID NO: 7156

SEQ ID NO: 7159 - RNA, 101 nt, Homo Sapiens; identical to SEQ ID NO: 7156

SEQ ID NO: 7160 - RNA, 101 nt, Homo Sapiens
ugaggcaggagaauugccugaacucaggaagcggaggucgcaguaagcugagaucaugccacugcacuccagccugggcaacagagcgagacucugucuca

SEQ ID NO: 7161 - RNA, 101 nt, Homo Sapiens
ugaggcaggagaauugcuugaacccaggaggcagaagcugcagugagccaagauagugccacugcacuccagccugggcaacagagcgagacuccgucuca

SEQ ID NO: 7162 - RNA, 102 nt, Homo Sapiens
ugaggcaggagaauugcuugaacccgggagguggagguugcagugagccaagauugcgccacugcacuccagccugggcaacaagagcaaaacucugucuca

SEQ ID NO: 7163 - RNA, 102 nt, Homo Sapiens
ugaggcaggagaauugcuugaacccgggagguggagguugcggugagccgaggucgcgccauugcacuccagccugggcaacaagagcgaaacuccgucuca

SEQ ID NO: 7164 - RNA, 101 nt, Homo Sapiens
ugaggcaggagaauugcuugaaccugggaggcagagguugcagugagcugaaaucgcgccacugcacuccagccugggcaauagggcaagacuccgucuca

SEQ ID NO: 7165 - RNA, 101 nt, Homo Sapiens
ugaggcaggagaauugcuugaacucgggaggcggauguugcagugagccaauaucgcaccacugcacuccagccugggcaacagagcaagacuccgucucg

SEQ ID NO: 7166 - RNA, 100 nt, Homo Sapiens
ugaggcaggagaauugcuugaacuugaaaggcagagguugcagugagccgaaauugcaccacugcacuccagccuggcgacagagcaagacuccaucuca

SEQ ID NO: 7167 - RNA, 101 nt, Homo Sapiens
ugaggcaggagagucgcuggaaccugagaggcggagcuugcagugagccgagaucgcgccacugcacuccagccugggcaacacagcgagacuccgucuca

SEQ ID NO: 7168 - RNA, 101 nt, Homo Sapiens
ugaggcaggaggauugcuucaacccaggagcuggaggcugcagugagcuaugaucaugccacugcacuccagccugggcaacagaauaauauccugccuca

SEQ ID NO: 7169 - RNA, 101 nt, Homo Sapiens
ugaggcagggaaaucgcuugaacccaggagacagagguuucagugagccgagaucgugccacugcacuccagccugggcaacagagugagacucugucuca

SEQ ID NO: 7170 - RNA, 102 nt, Homo Sapiens
ugaggccggagaaucgcuugaacccuagaggcagguugcagugagcccagauugcaucaccacugcacuccagccugggcaacagagggagacuccaucuca

SEQ ID NO: 7171 - RNA, 101 nt, Homo Sapiens
ugaggccugagaauugcuugaacccaggagguagagguugcagugagcugagaucgcaccacugcacuccagccugggcaacagagcuagacucugccuca

SEQ ID NO: 7172 - RNA, 110 nt, Homo Sapiens
ugaggcgcccugaaaacauaggcugggcuugugugagaugggagaaagaccagaaguaucgucuaaacuucucccugcccacacauccagcuucauggcacugugcuaca

SEQ ID NO: 7173 - RNA, 101 nt, Homo Sapiens
ugaggcgggagaauggcgugaacccaggagguggagcuugcagugagcggagaucuugccacugcacuccagccugggcaacagagcgagacucugucuca

SEQ ID NO: 7174 - RNA, 101 nt, Homo Sapiens
ugagggaggagaauggcaugaaccugggagguggagcuugcagugagcccagauugcaacacugcacuccagccugggcaacagagccagacucugucuca

SEQ ID NO: 7175 - RNA, 116 nt, Homo Sapiens
ugagguaaguauguuauuggaaaggugugaucuauauagaacccuguacaugaaaaggaggagaugccgcuaucuuggcagggaugaucauguauuugaaauaguaacucacagca

SEQ ID NO: 7176 - RNA, 100 nt, Homo Sapiens
ugagguacgacaauugcuugaacccaggagguggaggcugcagugagugagaucacaccacugcacuccagccugggcaacagagugagacccuaucuca

SEQ ID NO: 7177 - RNA, 101 nt, Homo Sapiens
ugagguaggagaaucacaugaacccgggagguggagguugcagugagccgagaccacgccauugcacaccaaccugggcaacagacugagacucugucuca

SEQ ID NO: 7178 - RNA, 102 nt, Homo Sapiens
ugagguaggagaaucacuugaacccgggaggcagagguugcggugagccgagauugugccacugcacuccagccugggcaacaagagcgaaacuccgucuca

SEQ ID NO: 7179 - RNA, 103 nt, Homo Sapiens
ugagguaggagaaucacuugaacucgggaggggaggcugcagugagccaagaucacacaccacugcacuccagccugggcaacaaagugagacccccaucuca

SEQ ID NO: 7180 - RNA, 103 nt, Homo Sapiens
ugagguaggagaaucgcuugaacucgggaggggaggcugcagugagccaagaucacacaccacugcacuccagccugggcaacaaagugagacccccaucuca

SEQ ID NO: 7181 - RNA, 103 nt, Homo Sapiens; identical to SEQ ID NO: 7180

SEQ ID NO: 7182 - RNA, 103 nt, Homo Sapiens; identical to SEQ ID NO: 7180

SEQ ID NO: 7183 - RNA, 103 nt, Homo Sapiens; identical to SEQ ID NO: 7180

SEQ ID NO: 7184 - RNA, 103 nt, Homo Sapiens; identical to SEQ ID NO: 7180

SEQ ID NO: 7185 - RNA, 101 nt, Homo Sapiens
ugaggugggaggauuacuugagcccaagaggaggaggcugcagugagucaacauugcaccacugcacuccagccugggcaacagagugugaccccaucuca

SEQ ID NO: 7186 - RNA, 86 nt, Homo Sapiens
ugaguaagaggagguggggaacuuugagagacaucguaauggcuguccaccacagucuuccuccguccccaccucccagugauuca

SEQ ID NO: 7187 - RNA, 101 nt, Homo Sapiens
ugaguguaugugugagagagaauguuauguuuaucacugaguucccauuguuucauucucauagcacuuauuucuucauacuuucuauacacauuuacucg

SEQ ID NO: 7188 - RNA, 68 nt, Homo Sapiens
ugauagcaacucugcuuccuugccucaggacagguuuguggcaaggaagaaagcagaaguugcuuuca

SEQ ID NO: 7189 - RNA, 80 nt, Homo Sapiens
ugaugaaaauccacaaugucuuugagcuucugguuguguaaugcugggguuuaaagucaccauuuguggguuuggcauca

SEQ ID NO: 7190 - RNA, 93 nt, Homo Sapiens
ugaugcgccacagguaucagcgucuggaucgccacuucacguuuuagccacaagugacucaguggaagauccagagucaacagaggcucguca

SEQ ID NO: 7191 - RNA, 85 nt, Homo Sapiens
ugauggaggaaauggugguaucuuguguuauuaagcacuugaacuugguugaugcacugcagucucuaauaaauuuccaauauca

SEQ ID NO: 7192 - RNA, 86 nt, Homo Sapiens
ugauguguguguaggaaaauauuaaggugggauguguggaucaguguccuagcacauucccgcaggguguaagccuggcacuauca

SEQ ID NO: 7193 - RNA, 86 nt, Homo Sapiens; identical to SEQ ID NO: 7192

SEQ ID NO: 7194 - RNA, 96 nt, Homo Sapiens
ugauucaaagcaagaugguagcauuggagaggaugagauauggucagaugaggauauauuuuaaaaguugagcuaacaggauuugcugaggaauca

SEQ ID NO: 7195 - RNA, 86 nt, Homo Sapiens
ugcaccuucccugggacaacuuucuuauugaugggucuuguguuuaauuaaugagaguuuguuuuagggguaugggcccaggugca

SEQ ID NO: 7196 - RNA, 97 nt, Homo Sapiens
ugcaugcuggguaaaucauucugucucauuugucuguuggaaauacaguucuggcacuaagauauggugaacagacagauggaggccacaacauuca

SEQ ID NO: 7197 - RNA, 90 nt, Homo Sapiens
ugcauuacccuccccaacuuaaaaucuuuugauaacccaggcagcuggguuauccccaauuuaaagucuuuuuguuguagcuguauggca

SEQ ID NO: 7198 - RNA, 88 nt, Homo Sapiens
ugcccuguugaccagaauuuguuagauugcuauuacaaugcugauuauauuuuauagcaauuacugacauaagguuauacuuugggca

SEQ ID NO: 7199 - RNA, 97 nt, Homo Sapiens
ugccucucuggcacuuccaaucuccuaccugugauagacgucuaagugaaaguacuagcuuaguuguuugggauugguagugacagagaaaacagca

SEQ ID NO: 7200 - RNA, 97 nt, Homo Sapiens
ugccugaauaaagcuagacguucauugaccagcagagucuuuuauaacuaccccaguuccguggaaaacuugggcuggucuaaguacuguccaggca

SEQ ID NO: 7201 - RNA, 77 nt, Homo Sapiens
ugcgggcaggaucacauauuaggcagaaaacaauuccaagcaaggagaguugcugggauuauucugcucuggucgca

SEQ ID NO: 7202 - RNA, 107 nt, Homo Sapiens
ugcuaaagaaagaggggcugauuugucagacuauuuugucuauaacuaggguagccauauaugccaauuuccccaaggcagucuugauuagcuucuauuuuuuggca

SEQ ID NO: 7203 - RNA, 95 nt, Homo Sapiens
ugcuaggcuuauucucuuccucauucagucucucaaucaaucaauacuuacugaguacuugucauugcaagaccugaggaauagaggggcuagca

SEQ ID NO: 7204 - RNA, 74 nt, Homo Sapiens
ugcucuguugccuaggcuggagugcagugaugcaauuuuggcucacugcaaccuccaccuccuggguucaagca

SEQ ID NO: 7205 - RNA, 100 nt, Homo Sapiens
ugcugcauccugccuggcucccaggaggccucucucagcauuuucugacaacaaagccggggcugcagaucccuggugagauuccaggcuagcaucagca

SEQ ID NO: 7206 - RNA, 105 nt, Homo Sapiens
ugcugggcgugugaggcggcugugcugugccugugagacaggaaugguuccauuacaccaugggaaaucacugauuuauaggucccaaacugccacacaucagca

SEQ ID NO: 7207 - RNA, 103 nt, Homo Sapiens
ugcuguaggcuguaugcuguuaaugcuaaucgugauagggguuuuugccuccaacugacuccuacauauuagcauuaacaguguaugaugccuguuacuagca

SEQ ID NO: 7208 - RNA, 125 nt, Homo Sapiens
ugcuguggccuaacaguuguuuucugaguauauuuucaugucaaauagcaaaaguagaacuuuuggaggaggugugaagaaaugaagagugacuagaggaaaauagagagucagaaguugcagua

SEQ ID NO: 7209 - RNA, 72 nt, Homo Sapiens
ugcuguugacauuuccccaugugaugcuauugcuucucuuuggaggcuaagcaguaaaugggguuaacagca

SEQ ID NO: 7210 - RNA, 97 nt, Homo Sapiens
ugcuuccuuaccuacaagaaaauuuagaaguuggugcaaauggcauuuccaugaguacuucucaugcaucuuugcauauuucaccuggggggaagca

SEQ ID NO: 7211 - RNA, 87 nt, Homo Sapiens
ugcuucuaggaaccuccaucucaugccauggugcuucgaggagcguaccagccuugcagcaccacaacagggacugggcuggaggca

SEQ ID NO: 7212 - RNA, 74 nt, Homo Sapiens
ugcuugaacccaaaaggcggagguugcagugagccaagauugugccacugcacuccagccugggcaacagagca

SEQ ID NO: 7213 - RNA, 72 nt, Homo Sapiens
ugcuugaacucgggguggagguugcagugagccaagaucgccccacugcacuccagccugggcaacaaugca

SEQ ID NO: 7214 - RNA, 90 nt, Homo Sapiens
uggaacuggaggagcuguccugugucagccugaaauaaucaaaaggaucaaaaauccuguuuuaggcaacauaggaagacuccaacucua

SEQ ID NO: 7215 - RNA, 127 nt, Homo Sapiens
uggaauguucugaagaacugggugaucuugugaaaucuguggacccuacauuggcacuuaguguguaccuaagggcuaacgucccaaauaaagucauucagugcuuugcagaaacaggucaagucca

SEQ ID NO: 7216 - RNA, 101 nt, Homo Sapiens
uggacuaggacccuggaggcagaaauaguuaccgaggggaaguuacaggccugagugugagucccuguuugguugcugaugagcuuugagguccuuggcca

SEQ ID NO: 7217 - RNA, 81 nt, Homo Sapiens
uggagacugguagcuuauuaaagaaacuccguguuacucauuccuggaguuggggguuucuguaggcacuuuauuucucca

SEQ ID NO: 7218 - RNA, 86 nt, Homo Sapiens
uggagcugagauucugugggugagagagugggagagugucugugggcugagcacugguccuuucugacucacagcucuggggccca

SEQ ID NO: 7219 - RNA, 102 nt, Homo Sapiens
uggagcugcuggguaaaauaauguguacuugucuuaguuugcucuuuuccaaguugaagucuggcagauuucaccagagcacagugucugcccccaccucca

SEQ ID NO: 7220 - RNA, 96 nt, Homo Sapiens
uggaggaaugggagcuaugggcaaauacugggagcuggcuggaugccaggauacagcagccaucugccaucauuacccuagcuucaggauccucua

SEQ ID NO: 7221 - RNA, 82 nt, Homo Sapiens
uggaggaggaggcuggugcugguuaaauacaaccuaaaucaaaccacaguugaccaaccaccacauccagcuucuccuucca

SEQ ID NO: 7222 - RNA, 122 nt, Homo Sapiens
uggaguauuuaagagugacuuaaacaacagauguucauacucugccaguucuggagguuggaaaguccaagaucagggugcuggcagauuugguugcuguuggguucucuucuuggcucgca

SEQ ID NO: 7223 - RNA, 96 nt, Homo Sapiens
uggcaccagcuuccaaagccaggaugaagaggaggagaaaggaugggguccacaccuuguuuucuccaccaucauccaggggcucugcugcugcua

SEQ ID NO: 7224 - RNA, 95 nt, Homo Sapiens
uggcaggaggccagcucucauccuuuucugcaaccuguuugcucacugguuuauuuguaaauuggggcuaugagggucuacugcugucccugcca

SEQ ID NO: 7225 - RNA, 97 nt, Homo Sapiens
uggccaugcacaguggcucgcaacuguaaucucagcacuuucggaagccaaggcggucagaucaccugaggucaggaguucgagaccagucuggcca

SEQ ID NO: 7226 - RNA, 73 nt, Homo Sapiens
uggccucucugugcuuccauuuccccaucuguaagauaggaauaacacaucucacaggagcauggagaggcua

SEQ ID NO: 7227 - RNA, 95 nt, Homo Sapiens
uggccucugggacucagauuccuccucuuuaaaauggugcuaauaauagcacccacccucugugaggaggaugcugugaggacaaaaugagauca

SEQ ID NO: 7228 - RNA, 88 nt, Homo Sapiens
uggcucacaccuguaauccccgcuacucaggagguuuaggcaggagaaucacuugaacccgagaggcagagguuacaguagugaguca

SEQ ID NO: 7229 - RNA, 82 nt, Homo Sapiens
uggcuucccaaagugcuggcguuacaggugugagccaccgcaccuggccaucccggcauuuuucuauucugcugugaggcua

SEQ ID NO: 7230 - RNA, 83 nt, Homo Sapiens
uggcuuuaucucuugccuugaccuccuacauuaucaacaaagugagaguuuaagaucuccugggcaggagauuucagaagcca

SEQ ID NO: 7231 - RNA, 91 nt, Homo Sapiens
ugggaaaaaaggcaguuuagaaaaaaguacauuugguauacaugcauagagaugugcauagcaaauggucugaaugaauggccuuagacca

SEQ ID NO: 7232 - RNA, 107 nt, Homo Sapiens
ugggauuacagacaugagccacugugcccagccagggcuguguguuauguagugacagcucacugauacagcucucucuggggacuuaggaaccaaguuugacccca

SEQ ID NO: 7233 - RNA, 104 nt, Homo Sapiens
ugggcaaaaagugagaaaguaagacugugggaggugacuguuacagaucggaaaacucugauugaaccauucacuuuauuagccaguaaacuuucucaacccca

SEQ ID NO: 7234 - RNA, 78 nt, Homo Sapiens
ugggccagauaguucucuguuguugggggauuucuugugcauugugggagauuucccaucuuuccucacuucuaccca

SEQ ID NO: 7235 - RNA, 80 nt, Homo Sapiens
ugggcccaggaggcuuugagaaagccuucucuguguacucuggagauagauggagaaguguuuucagauuccugggaaca

SEQ ID NO: 7236 - RNA, 82 nt, Homo Sapiens
ugggcgccuguaaucucagcuacuugggaggcugagacagagaauugcuugaacccaggaggcggagguugcagugagccua

SEQ ID NO: 7237 - RNA, 113 nt, Homo Sapiens
ugggcugagggaaagcauguccacaccaggugcccagacaucugguuggcuuuggcugauuuguccugcaggcaccugccuugucuggauuugcacacuuuccaaguugccca

SEQ ID NO: 7238 - RNA, 113 nt, Homo Sapiens; identical to SEQ ID NO: 7237

SEQ ID NO: 7239 - RNA, 100 nt, Homo Sapiens
uggggcaggacgauugcuugagcccaggagcuuaaagcugcaguaaguggugacuugccacugcacuccagccugggcaacaaagcaagacucugucuca

SEQ ID NO: 7240 - RNA, 99 nt, Homo Sapiens
uggggccuugguaauauaggaaaccuucuugccaauauaggaauauguugacauauuagcuauagcaaaaggcuuauauuagcaccgaaugaggcucug

SEQ ID NO: 7241 - RNA, 83 nt, Homo Sapiens
ugggggcacuggcuucugcucuugcucuuucuucuggaaacauuauucuguuccuuuggacaugggcaaggguccugucccua

SEQ ID NO: 7242 - RNA, 91 nt, Homo Sapiens
ugggguacugagagucaaagacuuggcugucagcccugagucugccucaaccuccaagggucauagccacggcuucacccucugugccuca

SEQ ID NO: 7243 - RNA, 78 nt, Homo Sapiens
uggggugcucaucuucuguaacuguugggaaggcucggugguccauuuucaccaguuaaagaauaugaggccagccca

SEQ ID NO: 7244 - RNA, 64 nt, Homo Sapiens
uggguacuuuaucucacacucugauuucuugcuucgugggaaacagacuguaauauuguaagca

SEQ ID NO: 7245 - RNA, 85 nt, Homo Sapiens
uggguagcaugaacuaagguagauaaaggcuucacgugguguuuggcauggcguagguguagauuggaccucaguuuucugccca

SEQ ID NO: 7246 - RNA, 106 nt, Homo Sapiens
ugggucccagauucuuccugguggaggcauucggagagcaacacccuggccuuaacacacuacauaucuuugaauuucacacgggggcagccuucugggaaaacca

SEQ ID NO: 7247 - RNA, 83 nt, Homo Sapiens
ugggugccuguaaucccagcuacuugggagguugaggcaggagaaucacuugaacccaggagguggagguugcagugagccca

SEQ ID NO: 7248 - RNA, 100 nt, Homo Sapiens
uggguggcgugagggggaaggugugugugugggguggcagggaggagaaggaaucugcucugugcuuauucuuguccccguuucuuuugcagccugccca

SEQ ID NO: 7249 - RNA, 113 nt, Homo Sapiens
ugguagggaauuagaugucucucagaaucuuuugucucugagaagaugccuagagaaaagggaauucaauaggauaaaagucauucuccagauucacauuuauuuuccuacca

SEQ ID NO: 7250 - RNA, 76 nt, Homo Sapiens
ugguccacauucuacauaguagcacccuccacacaguggacaaugucaagagguggcacugugugggguggggcca

SEQ ID NO: 7251 - RNA, 80 nt, Homo Sapiens
ugguggaaggaaaaccugucauuccaaggacagucccaugacagggaagcugacacuucaguggcagguuaaucccccca

SEQ ID NO: 7252 - RNA, 99 nt, Homo Sapiens
ugguggcauaugcguguaaucccagcuacuugggaggcugaggcaggagaauugcuugaacccaggagguggagguuacagugagcagagauugcacca

SEQ ID NO: 7253 - RNA, 109 nt, Homo Sapiens
ugguggcuugguuuguguaccuauuuuucugcauuuguauuggaaaagguuucuuuuaagacauuuuccaaaaguggagaggaauauguguguucaggaagggcuuuca

SEQ ID NO: 7254 - RNA, 103 nt, Homo Sapiens
uggugggacacagagccagugacugacauagaagagcagugggguagaauuacaguuccaucuggugccuuuucucugagcaaagcuguauccaucaccacca

SEQ ID NO: 7255 - RNA, 113 nt, Homo Sapiens
ugguucauaauauuccuugcagauguugaacgaugggcuggauuguuuuggaaccuuguuccagcagagcccauguguucaugaagaaaacauuugcuuacagcuuaugacua

SEQ ID NO: 7256 - RNA, 99 nt, Homo Sapiens
ugguugaggccaggaauucgagacaagucugggcaacaaagugagaucccaucucuacaaaaaauuagccagacuggugggcucccuuagccucagcua

SEQ ID NO: 7257 - RNA, 106 nt, Homo Sapiens
ugguugcaaggcaggaaauauuggugaaaugcuagcaaagucacaauuucuacucugaacaugauuugcaguguucaucaguauuuuucugaacccugcuuuacca

SEQ ID NO: 7258 - RNA, 101 nt, Homo Sapiens
ugguuguuaugagucugguuguuaagugcugguuguuaguuguuaaaguagagaaaaccccuagcacagugcuuggcacacacuaaagccaucauaaacca

SEQ ID NO: 7259 - RNA, 107 nt, Homo Sapiens
ugguuuagcuuaggaacagcaucuggcacauaguaaguguucagugaacguuagcuauuaccaucaucacuauuaaugugugcuagugacuguccugaguuacauua

SEQ ID NO: 7260 - RNA, 74 nt, Homo Sapiens
ugguuucauuaaaauguguaagguuggcugggugcaguaacucaugccuguaaucccagcauuuuaggagacca

SEQ ID NO: 7261 - RNA, 76 nt, Homo Sapiens
ugguuugagcccaggaggcagaaguugcagugagcugaaaucaugccacugcacuccagccugggugauagagcca

SEQ ID NO: 7262 - RNA, 121 nt, Homo Sapiens
uguauugcagcagguuggcagccucaguaaaucuccauuuguaaaugugacagucagcagaaucuccaguuacagucaacucaaagcaagcaggggcaugccacauacauguucauauaua

SEQ ID NO: 7263 - RNA, 94 nt, Homo Sapiens
ugucccuuccaagcuguguuaacuguucaaacucaggccugugugacuccauuggggugagaggugaaagcauaacauggguacagaggggaca

SEQ ID NO: 7264 - RNA, 111 nt, Homo Sapiens
ugucuauagaguaugugggccauuuucugcccguaaaauguucaaauguuuucucucucuaaagcuuuguucauuguaucugguggaauuuugguucucagggaguagaca

SEQ ID NO: 7265 - RNA, 111 nt, Homo Sapiens; identical to SEQ ID NO: 7264

SEQ ID NO: 7266 - RNA, 111 nt, Homo Sapiens; identical to SEQ ID NO: 7264

SEQ ID NO: 7267 - RNA, 101 nt, Homo Sapiens
ugugaaacacagccaguuucuuugaugacucaaaacguacuuugugaucuugccaagcuuugagaucaucguuacaagcagcauuuugguugugaaaaaca

SEQ ID NO: 7268 - RNA, 95 nt, Homo Sapiens
ugugaaaccauuaugcagaugaagaagaugaagcccgagagguuaugaaacagacccaagugggcucgcucuucagucucggcauaaggaauccg

SEQ ID NO: 7269 - RNA, 58 nt, Homo Sapiens
ugugagccaccgcgccuggccucaaauuguuuuugaaguaguuagguuguagcucaua

SEQ ID NO: 7270 - RNA, 103 nt, Homo Sapiens
ugugagcuccugaggagucaggccugagucugugggucaucuagcacauccuuaauagaaugauugccuggaugugaccacccucacccccaacccucacaca

SEQ ID NO: 7271 - RNA, 86 nt, Homo Sapiens
ugugcauuccuuccagagcauuugugaggaguguucagcugcugcaaacaucccaugaauccucagcuacuuggaacagguguaca

SEQ ID NO: 7272 - RNA, 82 nt, Homo Sapiens
ugugccugccccaaucuuguguuuuauugcuggccaccuguagccaggcacugugcaggaugaugggauccagcaguguaca

SEQ ID NO: 7273 - RNA, 108 nt, Homo Sapiens
uguggagaauuaaaaaggguagugaggcuggcauuuauagaaucuggcuuucuuguauuggguggaaagcuagaugaaaccaguuucucucagccuuuucucuccuca

SEQ ID NO: 7274 - RNA, 92 nt, Homo Sapiens
uguggcucugccucccugucucacucucccuauaacuggccucucccugcucagaccuuccuggacgagcugcaugagacagggcagcugca

SEQ ID NO: 7275 - RNA, 78 nt, Homo Sapiens
ugugggaagaugcuggcaaggugcuggagggcccuggaggcaaagggccugccucgaccuugccccccauaacccaca

SEQ ID NO: 7276 - RNA, 79 nt, Homo Sapiens
uguggggaucuggugcugugguucugcaugaagacaguaacggugucuucauccaggaaccacauugucuggaccuaca

SEQ ID NO: 7277 - RNA, 102 nt, Homo Sapiens
ugugguccacaaggggagagcaggggacacagcauuggcaggaaccucaaauuccugaccaaacccucuuccacacaaugccucccgaaagaaaggaaccca

SEQ ID NO: 7278 - RNA, 90 nt, Homo Sapiens
ugugucagucaggauaggucaacugcuguaacaaacagcccucaaaucucaguggcugaacaccauacagcucugcuucuggcucacaca

SEQ ID NO: 7279 - RNA, 100 nt, Homo Sapiens
uguucagaaagucuguuguuguaaacauccccgacuggaagcuguaagacacagcuaagcuuucagucagauguuugcugcuaccggcuauucacagaca

SEQ ID NO: 7280 - RNA, 119 nt, Homo Sapiens
uguuccucuaagguugucauaauaagugcaucauuaccaaguauuacagcagguacugguuugcaucagggcugcugacguugucugugggcauuguuaagaaaccaaucugggaaaca

SEQ ID NO: 7281 - RNA, 87 nt, Homo Sapiens
uguugauggucucauaacugaauauauuaaaaacuuaaauuguauacuuuaaguuggugauuguaugauauaugaguuuuaucaaua

SEQ ID NO: 7282 - RNA, 88 nt, Homo Sapiens
uguuggccaggauugucuugaucuccugaccuugugaucggcccaccucggccucccaaaguacugagauuacagacgugagccacca

SEQ ID NO: 7283 - RNA, 95 nt, Homo Sapiens
uguuuugacucuccgccuucccuuaggucuggaaugguagagcauugaguacuguuaucuuccacaucucaggagaagggggcaguagagagaca

SEQ ID NO: 7284 - RNA, 101 nt, Homo Sapiens
uuacugaguauucaccaggugcuggguggagaaagaagacuuaaagauucccuagacaucuccucuccccuagacucaggaccauggcacuuauuuucuag

SEQ ID NO: 7285 - RNA, 115 nt, Homo Sapiens
uuagcaccugccuauauuacauucauuuugaugguuuguaucucaaaggaguacagugaacgaaacuuguuuaaagauacaccggaaagaaaaagagaagaggcagaguggcuug

SEQ ID NO: 7286 - RNA, 93 nt, Homo Sapiens
uuagccucccagauguccuugugcuaguuuuagcuguuuucagguguugauaaaagcuccaggagcuggcaggaggagagcagaggaagcuag

SEQ ID NO: 7287 - RNA, 84 nt, Homo Sapiens
uuaggaaaguaguuuuaaucucauaggcccccaguggggauccccugggauccucuggccaugcugugagaacugcuagccuag

SEQ ID NO: 7288 - RNA, 72 nt, Homo Sapiens
uuaugaauccguuuuuaugaaauguccaaaauaggcaaaucuauggacagaaaguagaaagcagauucgugg

SEQ ID NO: 7289 - RNA, 110 nt, Homo Sapiens
uucacccucucagccaggcuggucuugaacuccugacuuugugauccaccugccuuggccacccaaagugcugguauuacaagugugagccaccgcgccuggccggugaa

SEQ ID NO: 7290 - RNA, 81 nt, Homo Sapiens
uucacgcuugaaccugggagguggagguugcagugagccgagaucaugccauugcacuccagccugggcaacaagagugaa

SEQ ID NO: 7291 - RNA, 91 nt, Homo Sapiens
uucacucccaaguggcuuuugucuggcagauuccgguggauuaugcaaagagggacugccagagaaucugagcuguuggaagacuucugaa

SEQ ID NO: 7292 - RNA, 113 nt, Homo Sapiens
uucagccagacgugauggaggaaauggugguaucuuguguuauuaagcacuugaacuugguugaugcacugcagucucuaauaaauuuccaauaucaagaagaacaugcugaa

SEQ ID NO: 7293 - RNA, 124 nt, Homo Sapiens
uucagguacuccaugugauauaugguuccacaauccucagcguguuaacugaagccuuguugaguuuaacaaagcugccauugaagaucuggggaaagugaagaaguugcaacagaguuuuggg

SEQ ID NO: 7294 - RNA, 111 nt, Homo Sapiens
uucagguuuucagacaccugcaguaguagaacagaauauuuuagcucugaggacaaucuaaguuaugaauagucugguucuguaaggauuugcauaguuuggagaaaugaa

SEQ ID NO: 7295 - RNA, 101 nt, Homo Sapiens
uucaguauagcaaggugcuagguuuuuuccuuuccccaccugucucuuagccuggggaauuaaaugagaagccuuagaauggguggcccuugugaccugaa

SEQ ID NO: 7296 - RNA, 81 nt, Homo Sapiens
uucaguggcauugggccuuggcugggaugcugaguuauccacuggagcaucggcaguacaggcaggcacagaggcagugga

SEQ ID NO: 7297 - RNA, 130 nt, Homo Sapiens
uucauuaggaaaggguuuugaggucaggacauggguaucugguguacaugggaguuugguggccucuauuguaggaggcuuuggaaauguguauuguugggagguccugagggaggaaguuugggaugaa

SEQ ID NO: 7298 - RNA, 102 nt, Homo Sapiens
uuccaagugaaaauagacuuucuggaggagcagaaaggacagcucuugguaucuugcuguccugagaacugcuccaguuaaauauauuuguauuuagaggaa

SEQ ID NO: 7299 - RNA, 67 nt, Homo Sapiens
uuccaugggcaggggccaugacagggagauaggccacaccuuucccagguggaaccugcagauggag

SEQ ID NO: 7300 - RNA, 106 nt, Homo Sapiens
uuccauuuucucauugccugaagaucucugcugaugcuccuggagaaugacuuugggggcuuuagaaagaauauugccaguccgucucggcaaggagaugauggga

SEQ ID NO: 7301 - RNA, 86 nt, Homo Sapiens
uucccugagacucuuuaacuucuugaaaaaaguugaugcuguuuuauuugaaaaaucgucaagacuauuaaaaggcaaauagggga

SEQ ID NO: 7302 - RNA, 113 nt, Homo Sapiens
uuccgauaaaagaguugccaagacccuuggaagcuccacaguaaugggugucuuucgguguccugaugagaugacugguggcugggggccucgaggagaguuucaaguuggag

SEQ ID NO: 7303 - RNA, 130 nt, Homo Sapiens
uucuauguuauacccuggaguccugguugaggggugggggaaucagaaaaguagguuuacauuuaacauuuuucuuaacuacauucacuucuuaaaaaggaacaagaaguguaaauaaguauguauagag

SEQ ID NO: 7304 - RNA, 76 nt, Homo Sapiens
uucucugucuuccauuccccuccuacgcccccagacugugagggguguaaggaagauggaagauguugcgggaggg

SEQ ID NO: 7305 - RNA, 124 nt, Homo Sapiens
uucugaacuugggccagaucuuaaccugcugguaaagcacuggcugaggguuuagacuuucaaggaauuugagguuguuuucccugccuuauugcaacccagugucuggcugcugagaccagag

SEQ ID NO: 7306 - RNA, 105 nt, Homo Sapiens
uucugcugucuauuaugagucugacuggcacagacaucugucaaggaagaaggauucuuugagcguauuugugucagucaacugcauauauggaccacaacagaa

SEQ ID NO: 7307 - RNA, 94 nt, Homo Sapiens
uucugucuuuugaauucugucgugacuggggcuaaacaacugucacuggcaagugacaagaggcacagacagcaggggaaauaaaaagagagaa

SEQ ID NO: 7308 - RNA, 112 nt, Homo Sapiens
uucugugauggguguacgacagauuauuuugugacugcagucuguucaaaucacaucacuaagcagcgcugagaugauuuguuggugcauuaaaagguuuugcaucauggaa

SEQ ID NO: 7309 - RNA, 67 nt, Homo Sapiens
uugaacccuggaggcggagguugcagugagccgagauggcaccacugcacuccagccugggcaacaa

SEQ ID NO: 7310 - RNA, 76 nt, Homo Sapiens
uugcucgaacccgggagacagagguugcagugagccgagauugugccacugcacuccagccugggcaacagagcga

SEQ ID NO: 7311 - RNA, 76 nt, Homo Sapiens
uugcuugaacccaagaggcggagguugcagugagcuaagaucaugccacugcacuccagccugggugacagagcaa

SEQ ID NO: 7312 - RNA, 76 nt, Homo Sapiens; identical to SEQ ID NO: 7311

SEQ ID NO: 7313 - RNA, 77 nt, Homo Sapiens
uugcuugaacccaagagguggagguugcagugagcugagauugcgccacugcacuccagccugggcaacaagagcaa

SEQ ID NO: 7314 - RNA, 76 nt, Homo Sapiens
uugcuugaacccaggaggcagagguugcagugagccaagauugugccacugcacuccagccugggcaacagaguga

SEQ ID NO: 7315 - RNA, 76 nt, Homo Sapiens
uugcuugaacccaggaggcagagguugcagugagccgagaucgugccacugcacuccauccugagugacaaagcaa

SEQ ID NO: 7316 - RNA, 76 nt, Homo Sapiens
uugcuugaacccaggagguggagguugcagugagcugagaccaugccauugcacuccagccugggcaacagaguga

SEQ ID NO: 7317 - RNA, 76 nt, Homo Sapiens
uugcuugaacccgggaggcagagguugcagugagcugagauggugccacugcacuccagccugggcaacagagcaa

SEQ ID NO: 7318 - RNA, 76 nt, Homo Sapiens
uugcuugaacccgggagguggagauugcagugagcugagaucaugccacugcacuccagccugggcgacagagcaa

SEQ ID NO: 7319 - RNA, 75 nt, Homo Sapiens
uugcuugaacccgggagguggagguugcagugagccgagaucgcccacugcacuccagccugggcaacagagcaa

SEQ ID NO: 7320 - RNA, 76 nt, Homo Sapiens
uugcuugaacccgggagguggagguugcagugagccgagaucgcgccauugcacuccagccugggcaacagagcaa

SEQ ID NO: 7321 - RNA, 71 nt, Homo Sapiens
uugcuugaacccgggagguggagguuguagugagccgagaucgcgccacugcacuccagccugggcaacag

SEQ ID NO: 7322 - RNA, 81 nt, Homo Sapiens
uugcuugaaccugggagggggagguuucagugagccgagccgagauugugucacugcacuccagccugggcaacagaguga

SEQ ID NO: 7323 - RNA, 76 nt, Homo Sapiens
uugcuugaaccugggagguggaaguugcagugagccaagauugugccacugcacuccagccugggcaauaaggcaa

SEQ ID NO: 7324 - RNA, 79 nt, Homo Sapiens
uugcuugaaccuuggaggcagagguugcagugagccaagaucaugccacugcacuguagccuccugggugacagaguga

SEQ ID NO: 7325 - RNA, 75 nt, Homo Sapiens
uugcuugagcccaggagcuuaaagcugcaguaaguggugacuugccacugcacuccagccugggcaacaaagcaa

SEQ ID NO: 7326 - RNA, 76 nt, Homo Sapiens
uugcuugagccccagaguuugaggcugcagugagcugugaucacaccacugcacuccagccugggcaacagaguga

SEQ ID NO: 7327 - RNA, 76 nt, Homo Sapiens
uugcuuuagcccaggaauucgaguuugcagugagcuaugauggugucauugcacuccagccugggcaaucaagcaa

SEQ ID NO: 7328 - RNA, 88 nt, Homo Sapiens
uugcuuucuaauuggaguaacuggccuuggaaccuguagucagucauuugccucagguuuaccugccagucccaccagucuaaagcaa

SEQ ID NO: 7329 - RNA, 68 nt, Homo Sapiens
uuggagcccagaagguugaagcugcagugagcugugaucaugccacugcacuccagccugggcaacag

SEQ ID NO: 7330 - RNA, 88 nt, Homo Sapiens
uuggaguuaggauccccagguucuaguccugagucuggacucuggguaagugacucagcgauucugaaccuuguuuccuuaucuuuga

SEQ ID NO: 7331 - RNA, 87 nt, Homo Sapiens
uuggcccucucugagucugagagaguaggugugcaauaagaguuaacauuugcuaacuugcagucuuauggcuccuuacagggcuga

SEQ ID NO: 7332 - RNA, 117 nt, Homo Sapiens
uugggaaacugagguaggagaaucacuugagccccggaggcagggguugcagugagcugagauugugccacugcacuccagccugggcaacagagugaaacuccaucaucaucucaa

SEQ ID NO: 7333 - RNA, 82 nt, Homo Sapiens
uugggcccaggaggcuuugagaaagccuucucuguguacucuggagauagauggagaaguguuuucagauuccugggaacag

SEQ ID NO: 7334 - RNA, 88 nt, Homo Sapiens
uugggcuacuuauaggagugaaaauaaacucugugaugugccagcaccagcacaggcucuuguaguuuccucccaacuuugggcucag

SEQ ID NO: 7335 - RNA, 80 nt, Homo Sapiens
uuggggguuguuacaugcaugaugcugagguuugggaauauggauggucccaucacccaggugauguauguaguacccaa

SEQ ID NO: 7336 - RNA, 93 nt, Homo Sapiens
uuggguccuaguaguaccaaagugcucauagugcagguaguuuuggcaugacucuacuguaguaugggcacuuccaguacucuuggauaacaa

SEQ ID NO: 7337 - RNA, 80 nt, Homo Sapiens
uugguuagguaguggaaccuucuaaaugacgcacuaugugauuccugugucauauagaauguucuaugauucuuagccag

SEQ ID NO: 7338 - RNA, 91 nt, Homo Sapiens
uuguggauauugaaguuugaagccuguuguucaucuauagaugcacuggaugggauuggaagucuucagauuucaguaggguuuuccacaa

SEQ ID NO: 7339 - RNA, 77 nt, Homo Sapiens
uuguggucuugcugauuuugagaauggagccccagaccuuccugguguuacagcucucaaagaagacaaggacccaa

SEQ ID NO: 7340 - RNA, 76 nt, Homo Sapiens
uuguugaagggcagugaagguagguuucagguuugguuuuacaaaccuguuaacuaccuccuguccagcuugacag

SEQ ID NO: 7341 - RNA, 99 nt, Homo Sapiens
uuguugauucuguugaggauauaucccuaugaugucccugggaagcgauggggcauucccagucaucugggaugugcaguuucuaaauauuaucaaugg

SEQ ID NO: 7342 - RNA, 87 nt, Homo Sapiens
uuuaguuuuaaggaagugucucuuggcuggccccuagauagcuuuaggaugggagcuagucaccagaaacaccaauccuugauuaga

SEQ ID NO: 7343 - RNA, 92 nt, Homo Sapiens
uuugagauuuuauugaguacuacuaaucuugacauauuuugguuggcaccacauucuugguauaguggguuagugguugaauaguuugcaga

SEQ ID NO: 7344 - RNA, 107 nt, Homo Sapiens
uuugauagauuuuucccuccagaauguuugcaucuauucacaugugcaucagcagugcauuuguaguuaaauguguaguuaacguucuguuuuuaaaacuauacaaa

SEQ ID NO: 7345 - RNA, 117 nt, Homo Sapiens
uuugcgcuauuaaaggcaagcugauauaaauuagaacucuucugaaugggccuucuauauuuaaaugggcuuuuucuaggaaguguauauuuguaaacuugucuugaauggaaaaaa

SEQ ID NO: 7346 - RNA, 52 nt, Homo Sapiens
uuuggaguaauucaguauagguucguuuaaaagagauuuuuauaacuucaga

SEQ ID NO: 7347 - RNA, 89 nt, Homo Sapiens
uuuuagcauggcuuguaauagcaaacaguuuguaauagcaaugacguguuauuuauugcagcauuguuuguaauagcaaaauacuggaa

SEQ ID NO: 7348 - RNA, 112 nt, Homo Sapiens
uuuucaauuuuuaaaaauuagauuuauugcagacuggccucaagcucccagacuauauuuuuuagcugcauuauuuagggguugaaaugccagcuuuugagacuuuugaaaa

SEQ ID NO: 7349 - RNA, 108 nt, Homo Sapiens
uuuugagauuuuauugaguacuacuaaucuugacauauuuugguuggcaccacauucuugguauaguggguuagugguugaauaguuugcagacuuugugaaacaaaa

SEQ ID NO: 7350 - RNA, 106 nt, Homo Sapiens
uuuuggcccugugcucuugauaacagaguguuugagggacaacuuucacauuugaguuuuuccaaaauuaaagguuguagaagagucacaguaucuauugucaaaa

SEQ ID NO: 7351 - RNA, 113 nt, Homo Sapiens
uuuugguaaagacauucaucucagucguuucucucucccagcuugaccuuagguuaauauuucauuugggucaagaaaagaauauguaggagagcuauguugcuuuaacaaga
